(19) United States
(12) Patent Application Publication
(10) Pub. No.: US 2018/0312828 A1
(43) Pub. Date: Nov. 1, 2018

(54) NUCLEOBASE EDITORS COMPRISING NUCLEIC ACID PROGRAMMABLE DNA BINDING PROTEINS

(71) Applicant: President and Fellows of Harvard College, Cambridge, MA (US)

(72) Inventors: David R. Liu, Lexington, MA (US); Alexis Christine Komor, Pasadena, CA (US); Liwei Chen, Somerville, MA (US); Holly A. Rees, Cambridge, MA (US)

(73) Assignee: President and Fellows of Harvard College, Cambridge, MA (US)

(21) Appl. No.: 15/934,945

(22) Filed: Mar. 23, 2018

Related U.S. Application Data
(60) Provisional application No. 62/551,951, filed on Aug. 30, 2017.
(60) Provisional application No. 62/511,934, filed on May 26, 2017.
(60) Provisional application No. 62/490,587, filed on Apr. 26, 2017.
(60) Provisional application No. 62/475,830, filed on Mar. 23, 2017.

(51) Int. Cl. C12N 9/78; C12N 9/22; C12N 15/11; C12N 15/10

(52) U.S. Cl. CPC C12N 9/78; C12N 9/22; C12N 15/11; A61K 38/00; C12N 2800/80; C12N 2310/20; C12N 15/102

(57) ABSTRACT

Some aspects of this disclosure provide strategies, systems, reagents, methods, and kits that are useful for the targeted editing of nucleic acids, including editing a single site within the genome of a cell or subject, e.g., within the human genome. In some embodiments, fusion proteins of nucleic acid programmable DNA binding proteins (napDNAbp), e.g., Cpf1 or variants thereof, and nucleic acid editing proteins or protein domains, e.g., deaminase domains, are provided. In some embodiments, methods for targeted nucleic acid editing are provided. In some embodiments, reagents and kits for the generation of targeted nucleic acid editing proteins, e.g., fusion proteins of a napDNAbp (e.g., CasX, CasY, Cpf1, C2c1, C2c2, C2C3, and Argonaute) and nucleic acid editing proteins or domains, are provided.

### BACKGROUND OF THE INVENTION

[0001] Targeted editing of nucleic acid sequences, for example, the targeted cleavage or the targeted introduction of a specific modification into genomic DNA, is a highly promising approach for the study of gene function and also has the potential to provide new therapies for human genetic diseases.¹ An ideal nucleic acid editing technology possesses three characteristics: (1) high efficiency of installing the desired modification; (2) minimal off-target activity; and (3) the ability to be programmed to edit precisely any site in a given nucleic acid, e.g., any site within the human genome.² Current genome engineering tools, including engineered zinc finger nucleases (ZFNs),³ transcription activator like effector nucleases (TALENs),⁴ and most recently, the RNA-guided DNA endonuclease Cas9,⁵ effect sequence-specific DNA cleavage in a genome. This programmable cleavage can result in mutation of the DNA at the cleavage site via non-homologous end joining (NHEJ) or replacement of the DNA surrounding the cleavage site via homology-directed repair (HDR).^{6,7}

[0002] One drawback to the current technologies is that both NHEJ and HDR are stochastic processes that typically result in modest gene editing efficiencies as well as unwanted gene alterations that can compete with the desired alteration.⁸ Since many genetic diseases in principle can be treated by effecting a specific nucleotide change at a specific location in the genome (for example, a C to T change in a specific codon of a gene associated with a disease),⁹ the development of a programmable way to achieve such precision gene editing would represent both a powerful new research tool, as well as a potential new approach to gene editing-based human therapeutics.

### SUMMARY OF THE INVENTION

[0003] Nucleic acid programmable DNA binding proteins (napDNAbp), such as the clustered regularly interspaced short palindromic repeat (CRISPR) system is a recently discovered prokaryotic adaptive immune system¹⁰ that has been modified to enable robust and general genome engineering in a variety of organisms and cell lines.¹¹ CRISPR-Cas (CRISPR associated) systems are protein-RNA complexes that use an RNA molecule (sgRNA) as a guide to localize the complex to a target DNA sequence via base-pairing.¹² In the natural systems, a Cas protein then acts as an endonuclease to cleave the targeted DNA sequence.¹³ The target DNA sequence must be both complementary to the sgRNA, and also contain a “protospacer-adjacent motif” (PAM) at the 3′-end of the complementary region in order for the system to function.¹⁴

[0004] Among the known Cas proteins, S. pyogenes Cas9 has been mostly widely used as a tool for genome engineering.¹⁵ This Cas9 protein is a large, multi-domain protein containing two distinct nuclease domains. Point mutations can be introduced into Cas9 to abolish nuclease activity, resulting in a dead Cas9 (dCas9) that still retains its ability to bind DNA in a sgRNA-programmed manner.¹⁶ In principle, when fused to another protein or domain, dCas9 can target that protein or domain to virtually any DNA sequence simply by co-expression with an appropriate sgRNA.

[0005] The potential of the dCas9 complex for genome engineering purposes is immense. Its unique ability to bring proteins to specific sites in a genome programmed by the sgRNA in theory can be developed into a variety of site-specific genome engineering tools beyond nucleases, including deaminases (e.g., cytidine deamianses), transcriptional activators, transcriptional repressors, histone-modifying proteins, integrases, and recombinases.¹¹ Some of these potential applications have recently been implemented through dCas9 fusions with transcriptional activators to afford RNA-guided transcriptional activators,^{17,18} transcriptional repressors,^{16,19,20} and chromatin modification enzymes.²¹ Simple co-expression of these fusions with a variety of sgRNAs results in specific expression of the target genes. These seminal studies have paved the way for the design and construction of readily programmable sequence-specific effectors for the precise manipulation of genomes.

[0006] Some aspects of the disclosure are based on the recognition that certain configurations of a nucleic acid programmable DNA binding protein (napDNAbp), for example CasX, CasY, Cpf1, C2c1, C2c2, C2c3, or Argonaute protein, and a cytidine deaminase domain fused by a linker are useful for efficiently deaminating target cytidine residues. Other aspects of this disclosure relate to the recognition that a nucleobase editing fusion protein with a cytidine deaminase domain fused to the N-terminus of a napDNAbp via a linker was capable of efficiently deaminating target nucleic acids in a double stranded DNA target molecule. See, for example, Examples 3 and 4 below, which demonstrate that the fusion proteins, which are also referred to herein as base editors, generate less indels and more efficiently deaminate target nucleic acids than other base editors, such as base editors without a UGI domain. Other aspects of this disclosure relate to the recognition that a nucleobase editing fusion protein with a cytidine deaminase domain fused to the N-terminus of napDNAbp via a linker perform base editing with higher efficiency and greatly improved product purity when the fusion protein is comprised of more than one UGI domain. See, for example, Example 17, which demonstrates that a fusion protein (e.g., base editor) comprising two UGI domains generates less indels and more efficiently deaminates target nucleic acids than other base editors, such as those comprising one UGI domain.

[0007] In some embodiments, the fusion protein comprises: (i) a nucleic acid programmable DNA binding protein (napDNAbp); (ii) a cytidine deaminase domain; and (iii) a uracil glycosylase inhibitor (UGI) domain, where the napDNAbp is a CasX, CasY, Cpf1, C2c1, C2c2, C2c3, or Argonaute protein. In some embodiments, the nucleic acid programmable DNA binding protein (napDNAbp) is a CasX protein. In some embodiments, the CasX protein comprises an amino acid sequence that is at least 90% identical to SEQ ID NO: 29 or 30. In some embodiments, the CasX protein comprises the amino acid sequence of SEQ ID NO: 29 or 30.

[0008] In some embodiments, the fusion protein comprises: (i) a nucleic acid programmable DNA binding protein (napDNAbp); (ii) a cytidine deaminase domain; (iii) a first uracil glycosylase inhibitor (UGI) domain; and (iv) a second uracil glycosylase inhibitor (UGI) domain, wherein the napDNAbp is a Cas9, dCas9, or Cas9 nickase protein. In some embodiments, the napDNAbp is a dCas9 protein. In some embodiments, the napDNAbp is a CasX, CasY, Cpf1, C2c1, C2c2, C2c3, or Argonaute protein. In some embodiments, the dCas9 protein is a S. pyogenes dCas9 (SpCas9d). In some embodiments, the dCas9 protein is a S. pyogenes dCas9 harboring a D10A mutation. In some embodiments, the dCas9 protein comprises an amino acid sequence that is at least 90% identical to SEQ ID NO: 6 or 7. In some embodiments, the dCas9 protein comprises the amino acid sequence of SEQ ID NO: 6 or 7. In some embodiments, the dCas9 protein is a S. aureus dCas9 (SaCas9d). In some embodiments, the dCas9 protein is a S. aureus dCas9 harboring a D10A mutation. In some embodiments, the dCas9 protein comprises an amino acid sequence that is at least 90% identical to SEQ ID NO: 33-36. In some embodiments, the dCas9 protein comprises the amino acid sequence of SEQ ID NO: 33-36.

[0009] In some embodiments, the nucleic acid programmable DNA binding protein (napDNAbp) is a CasY protein. In some embodiments, the CasY protein comprises an amino acid sequence that is at least 90% identical to SEQ ID NO: 31. In some embodiments, the CasY protein comprises the amino acid sequence of SEQ ID NO: 31.

[0010] In some embodiments, the nucleic acid programmable DNA binding protein (napDNAbp) is a Cpf1 or Cpf1 mutant protein. In some embodiments, the Cpf1 or Cpf1 mutant protein comprises an amino acid sequence that is at least 90% identical to any one of SEQ ID NOs: 9-24. In some embodiments, the Cpf1 or Cpf1 mutant protein comprises the amino acid sequence of any one of SEQ ID NOs: 9-24.

[0011] In some embodiments, the nucleic acid programmable DNA binding protein (napDNAbp) is a C2c1 protein. In some embodiments, the C2c1 protein comprises an amino acid sequence that is at least 90% identical to SEQ ID NO: 26. In some embodiments, the C2c1 protein comprises the amino acid sequence of SEQ ID NO: 26.

[0012] In some embodiments, the nucleic acid programmable DNA binding protein (napDNAbp) is a C2c2 protein. In some embodiments, the C2c2 protein comprises an amino acid sequence that is at least 90% identical to SEQ ID NO: 27. In some embodiments, the C2c2 protein comprises the amino acid sequence of SEQ ID NO: 27.

[0013] In some embodiments, the nucleic acid programmable DNA binding protein (napDNAbp) is a C2c3 protein. In some embodiments, the C2c3 protein comprises an amino acid sequence that is at least 90% identical to SEQ ID NO: 28. In some embodiments, the C2c3 protein comprises the amino acid sequence of SEQ ID NO: 28.

[0014] In some embodiments, the nucleic acid programmable DNA binding protein (napDNAbp) is an Argonaute protein. In some embodiments, the Argonaute protein comprises an amino acid sequence that is at least 90% identical to SEQ ID NO: 25. In some embodiments, the Argonaute protein comprises the amino acid sequence of SEQ ID NO: 25.

[0015] Some aspects of the disclosure are based on the recognition that fusion proteins provided herein are capable of generating one or more mutations (e.g., a C to T mutation) without generating a large proportion of indels. In some embodiments, any of the fusion proteins (e.g., base editing proteins) provided herein generate less than 10% indels. In some embodiments, any of the fusion proteins (e.g., base editing proteins) provided herein generate less than 10%, 9%, 8%, 7%, 6%, 5.5%, 5%, 4.5%, 4%, 3.5%, 3%, 2.5%, 2%, 1.5%, 1%, 0.5%, or 0.1% indels.

[0016] In some embodiments, the fusion protein comprises a napDNAbp and an apolipoprotein B mRNA-editing complex 1 (APOBEC1) deaminase domain, where the deaminase domain is fused to the N-terminus of the napDNAbp domain via a linker comprising the amino acid sequence SGSETPGTSESATPES (SEQ ID NO: 604). In some embodiments, the napDNAbp comprises the amino acid sequence of any of the napDNAbp provided herein. In some embodiments, the deaminase is rat APOBEC1 (SEQ ID NO: 76). In some embodiments, the deaminase is human APOBEC1 (SEQ ID NO: 74). In some embodiments, the deaminase is pmCDA1 (SEQ ID NO: 81). In some embodiments, the deaminase is human APOBEC3G (SEQ ID NO: 60). In some embodiments, the deaminase is a human APOBEC3G variant of any one of (SEQ ID NOs: 82-84). In some embodiments, the fusion protein comprises a napDNAbp and an apolipoprotein B mRNA-editing complex 1 catalytic polypeptide-like 3G (APOBEC3G) deaminase domain, wherein the deaminase domain is fused to the N-terminus of the napDNAbp domain via a linker of any length or composition (e.g., an amino acid sequence, a peptide, a polymer, or a bond). In some embodiments, the linker comprises the amino acid sequence SGSETPGTSESATPES (SEQ ID NO: 604). In some embodiments, the linker comprises the amino acid sequence SGGSSGGSSGSETPGTSESATPESSGGSSGGS (SEQ ID NO: 605).

[0017] In some embodiments, the fusion protein comprises a napDNAbp and a cytidine deaminase 1 (CDA1) deaminase domain, wherein the deaminase domain is fused to the N-terminus of the napDNAbp domain via a linker comprising the amino acid sequence SGSETPGTSESATPES (SEQ ID NO: 604). In some embodiments, the linker comprises the amino acid sequence SGGSSGGSSGSETPGTSESATPESSGGSSGGS (SEQ ID NO: 605). In some embodiments, the napDNAbp comprises the amino acid sequence of any of the napDNAbps provided herein.

[0018] In some embodiments, the fusion protein comprises a napDNAbp and an activation-induced cytidine deaminase (AID) deaminase domain, where the deaminase domain is fused to the N-terminus of the napDNAbp domain via a linker comprising the amino acid sequence SGSETPGTSESATPES (SEQ ID NO: 604). In some embodiments, the linker comprises the amino acid sequence SGGSSGGSSGSETPGTSESATPESSGGSSGGS (SEQ ID NO: 605). In some embodiments, the napDNAbp comprises the amino acid sequence of any of the napDNAbps provided herein.

[0019] Some aspects of the disclosure are based on the recognition that certain configurations of a napDNAbp, and a cytidine deaminase domain fused by a linker are useful for efficiently deaminating target cytidine residues. Other aspects of this disclosure relate to the recognition that a nucleobase editing fusion protein with an apolipoprotein B mRNA-editing complex 1 (APOBEC1) deaminase domain fused to the N-terminus of a napDNAbp via a linker comprising the amino acid sequence SGSETPGTSESATPES (SEQ ID NO: 604) was capable of efficiently deaminating target nucleic acids in a double stranded DNA target molecule. In some embodiments, the fusion protein comprises a napDNAbp domain and an apolipoprotein B mRNA-editing complex 1 (APOBEC1) deaminase domain, where the deaminase domain is fused to the N-terminus of the napDNAbp via a linker comprising the amino acid sequence SGSETPGTSESATPES (SEQ ID NO: 604).

[0020] Some aspects of this disclosure provide strategies, systems, reagents, methods, and kits that are useful for the targeted editing of nucleic acids, including editing a single site within a subject's genome, e.g., a human's genome. In some embodiments, fusion proteins of napDNAbp (e.g., CasX, CasY, Cpf1, C2c1, C2c2, C2c3, or Argonaute protein) and deaminases or deaminase domains, are provided. In some embodiments, methods for targeted nucleic acid editing are provided. In some embodiments, reagents and kits for the generation of targeted nucleic acid editing proteins, e.g., fusion proteins of napDNAbp and deaminases or deaminase domains, are provided.

[0021] Some aspects of this disclosure provide fusion proteins comprising a napDNAbp as provided herein that is fused to a second protein (e.g., an enzymatic domain such as a cytidine deaminase domain), thus forming a fusion protein. In some embodiments, the second protein comprises an enzymatic domain, or a binding domain. In some embodiments, the enzymatic domain is a nuclease, a nickase, a recombinase, a deaminase, a methyltransferase, a methylase, an acetylase, an acetyltransferase, a transcriptional activator, or a transcriptional repressor domain. In some embodiments, the enzymatic domain is a nucleic acid editing domain. In some embodiments, the nucleic acid editing domain is a deaminase domain. In some embodiments, the deaminase is a cytosine deaminase or a cytidine deaminase. In some embodiments, the deaminase is an apolipoprotein B mRNA-editing complex (APOBEC) family deaminase. In some embodiments, the deaminase is an APOBEC1 deaminase. In some embodiments, the deaminase is an APOBEC2 deaminase. In some embodiments, the deaminase is an APOBEC3 deaminase. In some embodiments, the deaminase is an APOBEC3A deaminase. In some embodiments, the deaminase is an APOBEC3B deaminase. In some embodiments, the deaminase is an APOBEC3C deaminase. In some embodiments, the deaminase is an APOBEC3D deaminase. In some embodiments, the deaminase is an APOBEC3E deaminase. In some embodiments, the deaminase is an APOBEC3F deaminase. In some embodiments, the deaminase is an APOBEC3G deaminase. In some embodiments, the deaminase is an APOBEC3H deaminase. In some embodiments, the deaminase is an APOBEC4 deaminase. In some embodiments, the deaminase is an activation-induced deaminase (AID). It should be appreciated that the deaminase may be from any suitable organism (e.g., a human or a rat). In some embodiments, the deaminase is from a human, chimpanzee, gorilla, monkey, cow, dog, rat, or mouse. In some embodiments, the deaminase is rat APOBEC1 (SEQ ID NO: 76). In some embodiments, the deaminase is human APOBEC1 (SEQ ID NO: 74). In some embodiments, the deaminase is pmCDA1.

[0022] Some aspects of this disclosure provide fusion proteins comprising: (i) a CasX, CasY, Cpf1, C2c1, C2c2, C2c3, or Argonaute protein domain comprising the amino acid sequence of SEQ ID NO: 32; and (ii) an apolipoprotein B mRNA-editing complex 1 (APOBEC1) deaminase domain, wherein the deaminase domain is fused to the N-terminus of the napDNAbp via a linker comprising the amino acid sequence of SGSETPGTSESATPES (SEQ ID NO: 604). In some embodiments, the deaminase is rat APOBEC1 (SEQ ID NO: 76). In some embodiments, the deaminase is human APOBEC1 (SEQ ID NO: 74). In some embodiments, the fusion protein comprises the amino acid sequence of SEQ ID NO: 591. In some embodiments, the fusion protein comprises the amino acid sequence of SEQ ID NO: 5737. In some embodiments, the deaminase is pmCDA1 (SEQ ID NO: 81). In some embodiments, the deaminase is human APOBEC3G (SEQ ID NO: 60). In some embodiments, the deaminase is a human APOBEC3G variant of any one of SEQ ID NOs: 82-84.

[0023] Other aspects of this disclosure relate to the recognition that fusion proteins comprising a deaminase domain, a napDNAbp domain and a uracil glycosylase inhibitor (UGI) domain demonstrate improved efficiency for deaminating target nucleotides in a nucleic acid molecule. Without wishing to be bound by any particular theory, cellular DNA-repair response to the presence of U:G heteroduplex DNA may be responsible for a decrease in nucleobase editing efficiency in cells. Uracil DNA glycosylase (UDG) catalyzes removal of U from DNA in cells, which may initiate base excision repair, with reversion of the U:G pair to a C:G pair as the most common outcome. As demonstrated herein, Uracil DNA Glycosylase Inhibitor (UGI) may inhibit human UDG activity. Without wishing to be bound by any particular theory, base excision repair may be inhibited by molecules that bind the single strand, block the edited base, inhibit UGI, inhibit base excision repair, protect the edited base, and/or promote “fixing” of the non-edited strand, etc. Thus, this disclosure contemplates fusion proteins comprising a napDNAbp-cytidine deaminase domain that is fused to a UGI domain.

[0024] Further aspects of this disclosure relate to the recognition that fusion proteins comprising a deaminase domain, a napDNAbp domain, and more than one uracil glycosylase inhibitor (UGI) domain (e.g., one, two, three, four, five, or more UGI domains) demonstrate improved efficiency for deaminating target nucleotides in a nucleic acid molecule and/or improved nucleic acid product purity. Without wishing to be bound by any particular theory, the addition of a second UGI domain may substantially decrease the access of UDG to the G:U base editing intermediate, thereby improving the efficiency of the base editing.

[0025] Some aspects of the disclosure are based on the recognition that any of the base editors provided herein are capable of modifying a specific nucleotide base without generating a significant proportion of indels. An “indel”, as used herein, refers to the insertion or deletion of a nucleotide base within a nucleic acid. Such insertions or deletions can lead to frame shift mutations within a coding region of a gene. In some embodiments, it is desirable to generate base editors that efficiently modify (e.g. mutate or deaminate) a specific nucleotide within a nucleic acid, without generating insertions or deletions (i.e., indels) in the nucleic acid. In certain embodiments, any of the base editors provided herein are capable of generating a greater proportion of intended modifications (e.g., point mutations or deaminations) versus indels.

[0026] In certain embodiments, any of the base editors provided herein are capable of generating a certain percentage of desired mutations. In some embodiments, the desired mutation is a C to T mutation. In some embodiments, the desired mutation is a C to A mutation, In some embodiments, the desired mutation is a C to G mutation. In some embodiments, any of the base editors provided herein are capable of generating at least 1% of desired mutations. In some embodiments, any of the base editors provided herein are capable of generating at least 1%, 2%, 3%, 4%, 5%, 10%, 15%, 20%, 25%, 30%, 40%, 45%, 50%, 60%, 70%, 80%, 90%, 95%, or 99% of desired mutations.

[0027] Some aspects of the disclosure are based on the recognition that any of the base editors provided herein are capable of efficiently generating an intended mutation, such as a point mutation, in a nucleic acid (e.g. a nucleic acid within a genome of a subject) without generating a significant number of unintended mutations, such as unintended point mutations.

[0028] In some embodiments, the deaminase domain of the fusion protein is fused to the N-terminus of the napDNAbp domain. In some embodiments, the UGI domain is fused to the C-terminus of the napDNAbp domain. In some embodiments, the napDNAbp and the nucleic acid editing domain are fused via a linker. In some embodiments, the napDNAbp domain and the UGI domain are fused via a linker. In some embodiments, a second UGI domain is fused to the C-terminus of a first UGI domain. In some embodiments, the first UGI domain and the second UGI domain are fused via a linker.

[0029] In certain embodiments, linkers may be used to link any of the peptides or peptide domains of the invention. The linker may be as simple as a covalent bond, or it may be a polymeric linker many atoms in length. In certain embodiments, the linker is a polpeptide or based on amino acids. In other embodiments, the linker is not peptide-like. In certain embodiments, the linker is a covalent bond (e.g., a carbon-carbon bond, disulfide bond, carbon-heteroatom bond, etc.). In certain embodiments, the linker is a carbon-nitrogen bond of an amide linkage. In certain embodiments, the linker is a cyclic or acyclic, substituted or unsubstituted, branched or unbranched aliphatic or heteroaliphatic linker. In certain embodiments, the linker is polymeric (e.g., polyethylene, polyethylene glycol, polyamide, polyester, etc.). In certain embodiments, the linker comprises a monomer, dimer, or polymer of aminoalkanoic acid. In certain embodiments, the linker comprises an aminoalkanoic acid (e.g., glycine, ethanoic acid, alanine, beta-alanine, 3-aminopropanoic acid, 4-aminobutanoic acid, 5-pentanoic acid, etc.). In certain embodiments, the linker comprises a monomer, dimer, or polymer of aminohexanoic acid (Ahx). In certain embodiments, the linker is based on a carbocyclic moiety (e.g., cyclopentane, cyclohexane). In other embodiments, the linker comprises a polyethylene glycol moiety (PEG). In other embodiments, the linker comprises amino acids. In certain embodiments, the linker comprises a peptide. In certain embodiments, the linker comprises an aryl or heteroaryl moiety. In certain embodiments, the linker is based on a phenyl ring. The linker may included funtionalized moieties to facilitate attachment of a nucleophile (e.g., thiol, amino) from the peptide to the linker. Any electrophile may be used as part of the linker. Exemplary electrophiles include, but are not limited to, activated esters, activated amides, Michael acceptors, alkyl halides, aryl halides, acyl halides, and isothiocyanates.

[0030] In some embodiments, the linker comprises the amino acid sequence (GGGGS)ₙ (SEQ ID NO: 607), (G)ₙ (SEQ ID NO: 608), (EAAAK)ₙ (SEQ ID NO: 609), (GGS)ₙ (SEQ ID NO:610), (SGGS)ₙ (SEQ ID NO: 606), SGSETPGTSESATPES (SEQ ID NO: 604), (XP)ₙ (SEQ ID NO: 611), SGGS(GGS)ₙ (SEQ ID NO: 612), SGGSSGGSSGSETPGTSESATPESSGGSSGGS (SEQ ID NO: 605), or any combination thereof, wherein n is independently an integer between 1 and 30, and X is any amino acid. In some embodiments, the linker comprises the amino acid sequence (GGS)ₙ (SEQ ID NO: 610), wherein n is 1, 3, or 7. In some embodiments, the linker comprises the amino acid sequence SGGS(GGS)ₙ (SEQ ID NO: 612), wherein n is 2. In some embodiments, the linker comprises the amino acid sequence SGSETPGTSESATPES (SEQ ID NO: 604). In some embodiments, the linker comprises the amino acid sequence SGGSSGGSSGSETPGTSESATPESSGGSSGGS (SEQ ID NO: 605).

[0031] In some embodiments, the fusion protein comprises the structure [nucleic acid editing domain]-[optional linker sequence]-[napDNAbp]-[optional linker sequence]-[UGI]. In some embodiments, the fusion protein comprises the structure [nucleic acid editing domain]-[optional linker sequence]-[UGI]-[optional linker sequence]-[napDNAbp]; [UGI]-[optional linker sequence]-[nucleic acid editing domain]-[optional linker sequence]-[napDNAbp]; [UGI]-[optional linker sequence]-[napDNAbp]-[optional linker sequence]-[nucleic acid editing domain]; [napDNAbp]-[optional linker sequence]-[UGI]-[optional linker sequence]-[nucleic acid editing domain]; [napDNAbp]-[optional linker sequence]-[nucleic acid editing domain]-[optional linker sequence]-[UGI]; or [nucleic acid editing domain]-[optional linker sequence]-[napDNAbp]-[optional linker sequence]-[first UGI]-[optional linker sequence]-[second UGI].

[0032] In some embodiments, the nucleic acid editing domain comprises a deaminase. In some embodiments, the nucleic acid editing domain comprises a deaminase. In some embodiments, the deaminase is a cytidine deaminase. In some embodiments, the deaminase is an apolipoprotein B mRNA-editing complex (APOBEC) family deaminase. In some embodiments, the deaminase is an APOBEC1 deaminase, an APOBEC2 deaminase, an APOBEC3A deaminase, an APOBEC3B deaminase, an APOBEC3C deaminase, an APOBEC3D deaminase, an APOBEC3F deaminase, an APOBEC3G deaminase, an APOBEC3H deaminase, or an APOBEC4 deaminase. In some embodiments, the deaminase is an activation-induced deaminase (AID). In some embodiments, the deaminase is a cytidine deaminase 1 (CDA1). In some embodiments, the deaminase is a Lamprey CDA1 (pmCDA1) deaminase.

[0033] In some embodiments, the deaminase is from a human, chimpanzee, gorilla, monkey, cow, dog, rat, or mouse. In some embodiments, the deaminase is from a human. In some embodiments the deaminase is from a rat. In some embodiments, the deaminase is a rat APOBEC1 deaminase comprising the amino acid sequence set forth in (SEQ ID NO: 76). In some embodiments, the deaminase is a human APOBEC1 deaminase comprising the amino acid sequence set forth in (SEQ ID NO: 74). In some embodiments, the deaminase is pmCDA1 (SEQ ID NO: 81). In some embodiments, the deaminase is human APOBEC3G (SEQ ID NO: 60). In some embodiments, the deaminase is a human APOBEC3G variant of any one of (SEQ ID NOs: 82-84). In some embodiments, the deaminase is at least 80%, at least 85%, at least 90%, at least 92%, at least 95%, at least 96%, at least 97%, at least 98%, at least 99%, or at least 99.5% identical to any one of the amino acid sequences set forth in SEQ ID NOs: 49-84.

[0034] In some embodiments, the UGI domain comprises an amino acid sequence that is at least 80%, at least 85%, at least 90%, at least 92%, at least 95%, at least 96%, at least 97%, at least 98%, at least 99%, or at least 99.5% identical to SEQ ID NO: 134. In some embodiments, the UGI domain comprises the amino acid sequence as set forth in SEQ ID NO: 134.

[0035] Some aspects of this disclosure provide complexes comprising a napDNAbp fusion protein as provided herein, and a guide RNA bound to the napDNAbp.

[0036] Some aspects of this disclosure provide methods of using the napDNAbp, fusion proteins, or complexes provided herein. For example, some aspects of this disclosure provide methods comprising contacting a DNA molecule (a) with a napDNAbp or a fusion protein as provided herein and with a guide RNA, wherein the guide RNA is about 15-100 nucleotides long and comprises a sequence of at least 10 contiguous nucleotides that is complementary to a target sequence; or (b) with a napDNAbp, a napDNAbp fusion protein, or a napDNAbp or napDNAbp complex with a gRNA as provided herein.

[0037] Some aspects of this disclosure provide kits comprising a nucleic acid construct, comprising (a) a nucleotide sequence encoding a napDNAbp or a napDNAbp fusion protein as provided herein; and (b) a heterologous promoter that drives expression of the sequence of (a). In some embodiments, the kit further comprises an expression construct encoding a guide RNA backbone, wherein the construct comprises a cloning site positioned to allow the cloning of a nucleic acid sequence identical or complementary to a target sequence into the guide RNA backbone.

[0038] Some aspects of this disclosure provide polynucleotides encoding a napDNAbp of a fusion protein as provided herein. Some aspects of this disclosure provide vectors comprising such polynucleotides. In some embodiments, the vector comprises a heterologous promoter driving expression of polynucleotide.

[0039] Some aspects of this disclosure provide cells comprising a napDNAbp protein, a fusion protein, a nucleic acid molecule, and/or a vector as provided herein.

[0040] It should be appreciated that any of the fusion proteins provided herein that include a Cas9 domain (e.g. Cas9, nCas9, or dCas9) may be replaced with any of the napDNAbp provided herein, for example CasX, CasY, Cpf1, C2c1, C2c2, C2c3, or Argonaute protein.

[0041] The description of exemplary embodiments of the reporter systems above is provided for illustration purposes only and not meant to be limiting. Additional reporter systems, e.g., variations of the exemplary systems described in detail above, are also embraced by this disclosure.

[0042] The summary above is meant to illustrate, in a non-limiting manner, some of the embodiments, advantages, features, and uses of the technology disclosed herein. Other embodiments, advantages, features, and uses of the technology disclosed herein will be apparent from the Detailed Description, the Drawings, the Examples, and the Claims.

### BRIEF DESCRIPTION OF THE DRAWINGS

[0043] FIG. 1 shows the deaminase activity of deaminases on single stranded DNA substrates. Single stranded DNA substrates using randomized PAM sequences (NNN PAM) were used as negative controls. Canonical PAM sequences used include the (NGG PAM).

[0044] FIG. 2 shows the activity of Cas9:deaminase fusion proteins on single stranded DNA substrates.

[0045] FIG. 3 illustrates double stranded DNA substrate binding by Cas9:deaminase:sgRNA complexes.

[0046] FIG. 4 illustrates a double stranded DNA deamination assay.

[0047] FIG. 5 demonstrates that Cas9 fusions can target positions 3-11 of double-stranded DNA target sequences (numbered according to the schematic in FIG. 5). Upper Gel: 1 μM rAPOBEC1-GGS-dCas9, 125 nM dsDNA, 1 equivalent sgRNA. Mid Gel: 1 μM rAPOBEC1-(GGS)₃ (SEQ ID NO: 610)-dCas9, 125 nM dsDNA, 1 equivalent sgRNA. Lower Gel: 1.85 μM rAPOBEC1-XTEN-dCas9, 125 nM dsDNA, 1 equivalent sgRNA.

[0048] FIG. 6 demonstrates that the correct guide RNA, e.g., the correct sgRNA, is required for deaminase activity.

[0049] FIG. 7 illustrates the mechanism of target DNA binding of in vivo target sequences by deaminase-dCas9:sgRNA complexes.

[0050] FIG. 8 shows successful deamination of exemplary disease-associated target sequences.

[0051] FIG. 9 shows in vitro C→T editing efficiencies using His6-rAPOBEC1-XTEN-dCas9.

[0052] FIG. 10 shows C→T editing efficiencies in HEK293T cells is greatly enhanced by fusion with UGI.

[0053] FIGS. 11A to 11C show NBE1 mediates specific, guide RNA-programmed C to U conversion in vitro. FIG. 11A: Nucleobase editing strategy. DNA with a target C at a locus specified by a guide RNA is bound by dCas9, which mediates the local denaturation of the DNA substrate. Cytidine deamination by a tethered APOBEC1 enzyme converts the target C to U. The resulting G:U heteroduplex can be permanently converted to an A:T base pair following DNA replication or repair. If the U is in the template DNA strand, it will also result in an RNA transcript containing a G to A mutation following transcription. FIG. 11B: Deamination assay showing an activity window of approximately five nucleotides. Following incubation of NBE1-sgRNA complexes with dsDNA substrates at 37° C. for 2 h, the 5′ fluorophore-labeled DNA was isolated and incubated with USER enzyme (uracil DNA glycosylase and endonuclease VIII) at 37° C. for 1 h to induce DNA cleavage at the site of any uracils. The resulting DNA was resolved on a denaturing polyacrylamide gel, and any fluorophore-linked strands were visualized. Each lane is labeled according to the position of the target C within the protospacer, or with “-” if no target C is present, counting the base distal from the PAM as position 1. FIG. 11C: Deaminase assay showing the sequence specificity and sgRNA-dependence of NBE1. The DNA substrate with a target C at position 7 was incubated with NBE1 as in FIG. 11B with either the correct sgRNA, a mismatched sgRNA, or no sgRNA. No C to U editing is observed with the mismatched sgRNA or with no sgRNA. The positive control sample contains a DNA sequence with a U synthetically incorporated at position 7.

[0054] FIGS. 12A to 12B show effects of sequence context and target C position on nucleobase editing efficiency in vitro. FIG. 12A: Effect of changing the sequence surrounding the target C on editing efficiency in vitro. The deamination yield of 80% of targeted strands (40% of total sequencing reads from both strands) for C₇ in the protospacer sequence 5′-TTATTTCGTGGATTTATTTA-3′(SEQ ID NO: 591) was defined as 1.0, and the relative deamination efficiencies of substrates containing all possible single-base mutations at positions 1-6 and 8-13 are shown. Values and error bars reflect the mean and standard deviation of two or more independent biological replicates performed on different days. FIG. 12B: Positional effect of each NC motif on editing efficiency in vitro. Each NC target motif was varied from positions 1 to 8 within the protospacer as indicated in the sequences shown on the right (the PAM shown in red, the protospacer plus one base 5′ to the protospacer are also shown). The percentage of total sequence reads containing T at each of the numbered target C positions following incubation with NBE1 is shown in the graph. Note that the maximum possible deamination yield in vitro is 50% of total sequencing reads (100% of targeted strands). Values and error bars reflect the mean and standard deviation of two or three independent biological replicates performed on different days. FIG. 12B depicts SEQ ID NOs: 619 through 626 from top to bottom, respectively.

[0055] FIGS. 13A to 13C show nucleobase editing in human cells. FIG. 13A: Protospacer and PAM sequences of the six mammalian cell genomic loci targeted by nucleobase editors. Target Cs are indicated with subscripted numbers corresponding to their positions within the protospacer. FIG. 13A depicts SEQ ID NOs: 127 through 132 from top to bottom, respectively. FIG. 13B: HEK293T cells were transfected with plasmids expressing NBE1, NBE2, or NBE3 and an appropriate sgRNA. Three days after transfection, genomic DNA was extracted and analyzed by high-throughput DNA sequencing at the six loci. Cellular C to T conversion percentages, defined as the percentage of total DNA sequencing reads with Ts at the target positions indicated, are shown for NBE1, NBE2, and NBE3 at all six genomic loci, and for wt Cas9 with a donor HDR template at three of the six sites (EMX1, HEK293 site 3, and HEK293 site 4). Values and error bars reflect the mean and standard deviation of three independent biological replicates performed on different days. FIG. 13C: Frequency of indel formation, calculated as described in the Methods, is shown following treatment of HEK293T cells with NBE2 and NBE3 for all six genomic loci, or with wt Cas9 and a single-stranded DNA template for HDR at three of the six sites (EMX1, HEK293 site 3, and HEK293 site 4). Values reflect the mean of at least three independent biological replicates performed on different days.

[0056] FIGS. 14A to 14C show NBE2- and NBE3-mediated correction of three disease-relevant mutations in mammalian cells. For each site, the sequence of the protospacer is indicated to the right of the name of the mutation, with the PAM and the base responsible for the mutation indicated in bold with a subscripted number corresponding to its position within the protospacer. The amino acid sequence above each disease-associated allele is shown, together with the corrected amino acid sequence following nucleobase editing in red. Underneath each sequence are the percentages of total sequencing reads with the corresponding base. Cells were nucleofected with plasmids encoding NBE2 or NBE3 and an appropriate sgRNA. Two days after nucleofection, genomic DNA was extracted and analyzed by HTS to assess pathogenic mutation correction. FIG. 14A: The Alzheimer's disease-associated APOE4 allele is converted to APOE3 ' in mouse astrocytes by NBE3 in 11% of total reads (44% of nucleofected astrocytes). Two nearby Cs are also converted to Ts, but with no change to the predicted sequence of the resulting protein (SEQ ID NO: 627). FIG. 14B The cancer-associated p53 N239D mutation is corrected by NBE2 in 11% of treated human lymphoma cells (12% of nucleofected cells) that are heterozygous for the mutation (SEQ ID NO: 628). FIG. 14C The p53 Y163C mutation is corrected by NBE3 in 7.6% of nucleofected human breast cancer cells (SEQ ID NO: 629).

[0057] FIGS. 15A to 15D show effects of deaminase-dCas9 linker length and composition on nucleobase editing. Gel-based deaminase assay showing the deamination window of nucleobase editors with deaminase-Cas9 linkers of GGS (FIG. 15A), (GGS)₃ (SEQ ID NO: 610) (FIG. 15B), XTEN (FIG. 15C), or (GGS)₇ (SEQ ID NO: 610) (FIG. 15D). Following incubation of 1.85 μM editor-sgRNA complexes with 125 nM dsDNA substrates at 37° C. for 2 h, the dye-conjugated DNA was isolated and incubated with USER enzyme (uracil DNA glycosylase and endonuclease VIII) at 37° C. for an additional hour to cleave the DNA backbone at the site of any uracils. The resulting DNA was resolved on a denaturing polyacrylamide gel, and the dye-conjugated strand was imaged. Each lane is numbered according to the position of the target C within the protospacer, or with—if no target C is present. 8U is a positive control sequence with a U synthetically incorporated at position 8.

[0058] FIGS. 16A to 16B show NBE1 is capable of correcting disease-relevant mutations in vitro. FIG. 16A: Protospacer and PAM sequences of seven disease-relevant mutations. The disease-associated target C in each case is indicated with a subscripted number reflecting its position within the protospacer. For all mutations except both APOE4 SNPs, the target C resides in the template (non-coding) strand. FIG. 16A depicts SEQ ID NOs: 631 through 636 from top to bottom, respectively. FIG. 16B: Deaminase assay showing each dsDNA oligonucleotide before (−) and after (+) incubation with NBE1, DNA isolation, and incubation with USER enzymes to cleave DNA at positions containing U. Positive control lanes from incubation of synthetic oligonucleotides containing U at various positions within the protospacer with USER enzymes are shown with the corresponding number indicating the position of the U.

[0059] FIG. 17 shows processivity of NBEL The protospacer and PAM of a 60-mer DNA oligonucleotide containing eight consecutive Cs is shown at the top. The oligonucleotide (125 nM) was incubated with NBE1 (2 μM) for 2 h at 37° C. The DNA was isolated and analyzed by high-throughput sequencing. Shown are the percent of total reads for the most frequent nine sequences observed. The vast majority of edited strands (>93%) have more than one C converted to T. This figure depicts SEQ ID NO: 309.

[0060] FIGS. 18A to 18H show the effect of fusing UGI to NBE1 to generate NBE2.

[0061] FIG. 18A: Protospacer and PAM sequences of the six mammalian cell genomic loci targeted with nucleobase editors. Editable Cs are indicated with labels corresponding to their positions within the protospacer. FIG. 18A depicts SEQ ID NOs: 127 through 132 from top to bottom, respectively. FIGS. 18B to 18G: HEK293T cells were transfected with plasmids expressing NBE1, NBE2, or NBE1 and UGI, and an appropriate sgRNA. Three days after transfection, genomic DNA was extracted and analyzed by high-throughput DNA sequencing at the six loci. Cellular C to T conversion percentages, defined as the percentage of total DNA sequencing reads with Ts at the target positions indicated, are shown for NBE1, NBE1 and UGI, and NBE2 at all six genomic loci. FIG. 18H: C to T mutation rates at 510 Cs surrounding the protospacers of interest for NBE1, NBE1 plus UGI on a separate plasmid, NBE2, and untreated cells are shown. The data show the results of 3,000,000 DNA sequencing reads from 1.5×106 cells. Values reflect the mean of at least two biological experiments conducted on different days.

[0062] FIG. 19 shows nucleobase editing efficiencies of NBE2 in U2OS and HEK293T cells. Cellular C to T conversion percentages by NBE2 are shown for each of the six targeted genomic loci in HEK293T cells and U2OS cells. HEK293T cells were transfected using lipofectamine 2000, and U2OS cells were nucleofected. U2OS nucleofection efficiency was 74%. Three days after plasmid delivery, genomic DNA was extracted and analyzed for nucleobase editing at the six genomic loci by HTS. Values and error bars reflect the mean and standard deviation of at least two biological experiments done on different days.

[0063] FIG. 20 shows nucleobase editing persists over multiple cell divisions. Cellular C to T conversion percentages by NBE2 are displayed at two genomic loci in HEK293T cells before and after passaging the cells. HEK293T cells were transfected using Lipofectamine 2000. Three days post transfection, the cells were harvested and split in half. One half was subjected to HTS analysis, and the other half was allowed to propagate for approximately five cell divisions, then harvested and subjected to HTS analysis.

[0064] FIG. 21 shows genetic variants from ClinVar that can be corrected in principle by nucleobase editing. The NCBI ClinVar database of human genetic variations and their corresponding phenotypes⁶⁸ was searched for genetic diseases that can be corrected by current nucleobase editing technologies. The results were filtered by imposing the successive restrictions listed on the left. The x-axis shows the number of occurrences satisfying that restriction and all above restrictions on a logarithmic scale.

[0065] FIG. 22 shows in vitro identification of editable Cs in six genomic loci. Synthetic 80-mers with sequences matching six different genomic sites were incubated with NBE1 then analyzed for nucleobase editing via HTS. For each site, the sequence of the protospacer is indicated to the right of the name of the site, with the PAM highlighted in red. Underneath each sequence are the percentages of total DNA sequencing reads with the corresponding base. A target C was considered as “editable” if the in vitro conversion efficiency is >10%. Note that maximum yields are 50% of total DNA sequencing reads since the non-targeted strand is not a substrate for nucleobase editing. This figure depicts SEQ ID NOs: 127 through 132 from top to bottom, respectively.

[0066] FIG. 23 shows activities of NBE1, NBE2, and NBE3 at EMX1 off-targets. HEK293T cells were transfected with plasmids expressing NBE1, NBE2, or NBE3 and a sgRNA matching the EMX1 sequence using Lipofectamine 2000. Three days after transfection, genomic DNA was extracted, amplified by PCR, and analyzed by high-throughput DNA sequencing at the on-target loci, plus the top ten known Cas9 off-target loci for the EMX1 sgRNA, as previously determined using the GUIDE-seq method⁵⁵. EMX1 off-target 5 locus did not amplify and is not shown. Sequences of the on-target and off-target protospacers and protospacer adjacent motifs (PAMs) are displayed. Cellular C to T conversion percentages, defined as the percentage of total DNA sequencing reads with T at each position of an original C within the protospacer, are shown for NBE1, NBE2, and NBE3. On the far right are displayed the total number of sequencing reads reported for each sequence. This figure depicts SEQ ID NOs: 127, and 637 through 645 from top to bottom, respectively.

[0067] FIG. 24 shows activities of NBE1, NBE2, and NBE3 at FANCF off-targets. HEK293T cells were transfected with plasmids expressing NBE1, NBE2, or NBE3 and a sgRNA matching the FANCF sequence using Lipofectamine 2000. Three days after transfection, genomic DNA was extracted, amplified by PCR, and analyzed by high-throughput DNA sequencing at the on-target loci, plus all of the known Cas9 off-target loci for the FANCF sgRNA, as previously determined using the GUIDE-seq method⁵⁵. Sequences of the on-target and off-target protospacers and protospacer adjacent motifs (PAMs) are displayed. Cellular C to T conversion percentages, defined as the percentage of total DNA sequencing reads with T at each position of an original C within the protospacer, are shown for NBE1, NBE2, and NBE3. On the far right are displayed the total number of sequencing reads reported for each sequence. This figure depicts SEQ ID NOs: 128 and 646 through 653 from top to bottom, respectively.

[0068] FIG. 25 shows activities of NBE1, NBE2, and NBE3 at HEK293 site 2 off-targets. HEK293T cells were transfected with plasmids expressing NBE1, NBE2, or NBE3 and a sgRNA matching the HEK293 site 2 sequence using Lipofectamine 2000. Three days after transfection, genomic DNA was extracted, amplified by PCR, and analyzed by high-throughput DNA sequencing at the on-target loci, plus all of the known Cas9 off-target loci for the HEK293 site 2 sgRNA, as previously determined using the GUIDE-seq method⁵⁵. Sequences of the on-target and off-target protospacers and protospacer adjacent motifs (PAMs) are displayed. Cellular C to T conversion percentages, defined as the percentage of total DNA sequencing reads with T at each position of an original C within the protospacer, are shown for NBE1, NBE2, and NBE3. On the far right are displayed the total number of sequencing reads reported for each sequence. This figure depicts SEQ ID NOs: 129, 654, and 655 from top to bottom, respectively.

[0069] FIG. 26 shows activities of NBE1, NBE2, and NBE3 at HEK293 site 3 off-targets. HEK293T cells were transfected with plasmids expressing NBE1, NBE2, or NBE3 and a sgRNA matching the HEK293 site 3 sequence using Lipofectamine 2000. Three days after transfection, genomic DNA was extracted, amplified by PCR, and analyzed by high-throughput DNA sequencing at the on-target loci, plus all of the known Cas9 off-target loci for the HEK293 site 3 sgRNA, as previously determined using the GUIDE-seq method.⁵⁵ Sequences of the on-target and off-target protospacers and protospacer adjacent motifs (PAMs) are displayed. Cellular C to T conversion percentages, defined as the percentage of total DNA sequencing reads with T at each position of an original C within the protospacer, are shown for NBE1, NBE2, and NBE3. On the far right are displayed the total number of sequencing reads reported for each sequence. This figure depicts SEQ ID NOs: 130 and 656 through 660 from top to bottom, respectively.

[0070] FIG. 27 shows activities of NBE1, NBE2, and NBE3 at HEK293 site 4 off-targets. HEK293T cells were transfected with plasmids expressing NBE1, NBE2, or NBE3 and a sgRNA matching the HEK293 site 4 sequence using Lipofectamine 2000. Three days after transfection, genomic DNA was extracted, amplified by PCR, and analyzed by high-throughput DNA sequencing at the on-target loci, plus the top ten known Cas9 off-target loci for the HEK293 site 4 sgRNA, as previously determined using the GUIDE-seq method.⁵⁵ Sequences of the on-target and off-target protospacers and protospacer adjacent motifs (PAMs) are displayed. Cellular C to T conversion percentages, defined as the percentage of total DNA sequencing reads with T at each position of an original C within the protospacer, are shown for NBE1, NBE2, and NBE3. On the far right are displayed the total number of sequencing reads reported for each sequence. This figure depicts SEQ ID NOs: 131 and 661 through 670 from top to bottom, respectively.

[0071] FIG. 28 shows non-target C mutation rates. Shown here are the C to T mutation rates at 2,500 distinct cytosines surrounding the six on-target and 34 off-target loci tested, representing a total of 14,700,000 sequence reads derived from approximately 1.8×106 cells.

[0072] FIGS. 29A to 29C show base editing in human cells. FIG. 29A shows possible base editing outcomes in mammalian cells. Initial editing resulted in a U:G mismatch. Recognition and excision of the U by uracil DNA glycosylase (UDG) initiated base excision repair (BER), which lead to reversion to the C:G starting state. BER was impeded by BE2 and BE3, which inhibited UDG. The U:G mismatch was also processed by mismatch repair (MMR), which preferentially repaired the nicked strand of a mismatch. BE3 nicked the non-edited strand containing the G, favoring resolution of the U:G mismatch to the desired U:A or T:A outcome. FIG. 29B shows HEK293T cells treated as described in the Materials and Methods in the Examples below. The percentage of total DNA sequencing read with Ts at the target positions indicated show treatment with BE1, BE2, or BE3, or for treatment with wt Cas9 with a donor HDR template. FIG. 29C shows frequency of indel formation following the treatment in FIG. 29B. Values are listed in FIG. 34. For FIGS. 29B and 29C, values and error bars reflect the mean and s.d. of three independent biological replicates performed on different days.

[0073] FIGS. 30A to 30B show BE3-mediated correction of two disease-relevant mutations in mammalian cells. The sequence of the protospacer is shown to the right of the mutation, with the PAM and the target base in red with a subscripted number indicating its position within the protospacer. Underneath each sequence are the percentages of total sequencing reads with the corresponding base. Cells were treated as described in the Materials and Methods. FIG. 30A shows the Alzheimer's disease-associated APOE4 allele converted to APOE3r in mouse astrocytes by BE3 in 74.9% of total reads. Two nearby Cs were also converted to Ts, but with no change to the predicted sequence of the resulting protein. Identical treatment of these cells with wt Cas9 and donor ssDNA results in only 0.3% correction, with 26.1% indel formation. This figure depicts SEQ ID NOs: 671 and 627. FIG. 30B shows the cancer associated p53 Y163C mutation corrected by BE3 in 7.6% of nucleofected human breast cancer cells with 0.7% indel formation. Identical treatment of these cells with wt Cas9 and donor ssDNA results in no mutation correction with 6.1% indel formation. This figure depicts SEQ ID NOs: 672 and 629.

[0074] FIG. 31 shows activities of BE1, BE2, and BE3 at HEK293 site 2 off-targets. HEK293T cells were transfected with plasmids expressing BE1, BE2, or BE3 and a sgRNA matching the HEK293 site 2 sequence using Lipofectamine 2000. Three days after transfection, genomic DNA was extracted, amplified by PCR, and analyzed by high-throughput DNA sequencing at the on-target loci, plus all of the known Cas9 and dCas9 off-target loci for the HEK293 site 2 sgRNA, as previously determined by Joung and coworkers using the GUIDE-seq method (63), and Adli and coworkers using chromatin immunoprecipitation high-throughput sequencing (ChIP-seq) experiments (18). Sequences of the on-target and off-target protospacers and protospacer adjacent motifs (PAMs) are displayed. Cellular C to T conversion percentages, defined as the percentage of total DNA sequencing reads with T at each position of an original C within the protospacer, are shown for BE1, BE2, and BE3. On the far right are displayed the total number of sequencing reads reported, and the ChIP-seq signal intensity reported for each sequence. This figure depicts SEQ ID NOs: 129, 654, 655 and 673 to 677 from top to bottom, respectively.

[0075] FIG. 32 shows activities of BE1, BE2, and BE3 at HEK293 site 3 off-targets. HEK293T cells were transfected with plasmids expressing BE1, BE2, or BE3 and a sgRNA matching the HEK293 site 3 sequence using Lipofectamine 2000. Three days after transfection, genomic DNA was extracted, amplified by PCR, and analyzed by high-throughput DNA sequencing at the on-target loci, plus all of the known Cas9 off-target loci and the top five known dCas9 off-target loci for the HEK293 site 3 sgRNA, as previously determined by Joung and coworkers using the GUIDE-seq method⁵⁴, and using chromatin immunoprecipitation high-throughput sequencing (ChIP-seq) experiments⁶¹. Sequences of the on-target and off-target protospacers and protospacer adjacent motifs (PAMs) are displayed. Cellular C to T conversion percentages, defined as the percentage of total DNA sequencing reads with T at each position of an original C within the protospacer, are shown for BE1, BE2, and BE3. On the far right are displayed the total number of sequencing reads reported, and the ChIP-seq signal intensity reported for each sequence. This figure depicts SEQ ID NOs: 130, 656 to 660 and 678-682 from top to bottom, respectively.

[0076] FIG. 33 shows activities of BE1, BE2, and BE3 at HEK293 site 4 off-targets. HEK293T cells were transfected with plasmids expressing BE1, BE2, or BE3 and a sgRNA matching the HEK293 site 4 sequence using Lipofectamine 2000. Three days after transfection, genomic DNA was extracted, amplified by PCR, and analyzed by high-throughput DNA sequencing at the on-target loci, plus the top ten known Cas9 off-target loci and the top five known dCas9 off-target loci for the HEK293 site 4 sgRNA, as previously determined using the GUIDE-seq method⁵⁴, and using chromatin immunoprecipitation high-throughput sequencing (ChIP-seq) experiments⁶¹. Sequences of the on-target and off-target protospacers and protospacer adjacent motifs (PAMs) are displayed. Cellular C to T conversion percentages, defined as the percentage of total DNA sequencing reads with T at each position of an original C within the protospacer, are shown for BE1, BE2, and BE3. On the far right are displayed the total number of sequencing reads reported, and the ChIP-seq signal intensity reported for each sequence. This figure depicts SEQ ID NOs: 131, 661 to 670, 683 and 684 from top to bottom, respectively.

[0077] FIG. 34 shows mutation rates of non-protospacer bases following BE3-mediated correction of the Alzheimer's disease-associated APOE4 allele to APOE3r in mouse astrocytes. The DNA sequence of the 50 bases on either side of the protospacer from FIG. 30A and FIG. 34B is shown with each base's position relative to the protospacer. The side of the protospacer distal to the PAM is designated with positive numbers, while the side that includes the PAM is designated with negative numbers, with the PAM. Underneath each sequence are the percentages of total DNA sequencing reads with the corresponding base for untreated cells, for cells treated with BE3 and an sgRNA targeting the APOE4 C158R mutation, or for cells treated with BE3 and an sgRNA targeting the VEGFA locus. Neither BE3-treated sample resulted in mutation rates above those of untreated controls. This figure depicts SEQ ID NOs: 685 to 688 from top to bottom, respectively.

[0078] FIG. 35 shows mutation rates of non-protospacer bases following BE3-mediated correction of the cancer-associated p53 Y163C mutation in HCC1954 human cells. The DNA sequence of the 50 bases on either side of the protospacer from FIG. 30B and FIG. 39Bis shown with each base's position relative to the protospacer. The side of the protospacer distal to the PAM is designated with positive numbers, while the side that includes the PAM is designated with negative numbers, with the PAM. Underneath each sequence are the percentages of total sequencing reads with the corresponding base for untreated cells, for cells treated with BE3 and an sgRNA targeting the TP53 Y163C mutation, or for cells treated with BE3 and an sgRNA targeting the VEGFA locus. Neither BE3-treated sample resulted in mutational rates above those of untreated controls. This figure depicts SEQ ID NOs: 689 to 692 from top to bottom, respectively.

[0079] FIGS. 36A to 36F show the effects of deaminase, linker length, and linker composition on base editing. FIG. 36A shows a gel-based deaminase assay showing activity of rAPOBEC1, pmCDA1, hAID, hAPOBEC3G, rAPOBEC1-GGS-dCas9, rAPOBEC1-(GGS)₃ (SEQ ID NO: 610)-dCas9, and dCas9-(GGS)₃ (SEQ ID NO: 610)-rAPOBEC1 on ssDNA. Enzymes were expressed in a mammalian cell lysate-derived in vitro transcription-translation system and incubated with 1.8 μM dye-conjugated ssDNA and USER enzyme (uracil DNA glycosylase and endonuclease VIII) at 37° C. for 2 hours. The resulting DNA was resolved on a denaturing polyacrylamide gel and imaged. The positive control is a sequence with a U synthetically incorporated at the same position as the target C. FIG. 36B shows coomassie-stained denaturing PAGE gel of the expressed and purified proteins used in FIGS. 36C to 36F. FIGS. 36C to 36F show gel-based deaminase assay showing the deamination window of base editors with deaminase-Cas9 linkers of GGS (FIG. 36C), (GGS)₃ (SEQ ID NO: 610) (FIG. 36D), XTEN (FIG. 36E), or (GGS)₇ (SEQ ID NO: 610) (FIG. 36F). Following incubation of 1.85 μM deaminase-dCas9 fusions complexed with sgRNA with 125 nM dsDNA substrates at 37° C. for 2 hours, the dye-conjugated DNA was isolated and incubated with USER enzyme at 37° C. for 1 hour to cleave the DNA backbone at the site of any uracils. The resulting DNA was resolved on a denaturing polyacrylamide gel, and the dye-conjugated strand was imaged. Each lane is numbered according to the position of the target C within the protospacer, or with—if no target C is present. 8U is a positive control sequence with a U synthetically incorporated at position 8.

[0080] FIGS. 37A to 37C show BE1 base editing efficiencies are dramatically decreased in mammalian cells. FIG. 37A Protospacer and PAM sequences of the six mammalian cell genomic loci targeted by base editors. Target Cs are indicated in red with subscripted numbers corresponding to their positions within the protospacer. FIG. 37B shows synthetic 80-mers with sequences matching six different genomic sites were incubated with BE1 then analyzed for base editing by HTS. For each site, the sequence of the protospacer is indicated to the right of the name of the site, with the PAM. Underneath each sequence are the percentages of total DNA sequencing reads with the corresponding base. We considered a target C as “editable” if the in vitro conversion efficiency is >10%. Note that maximum yields are 50% of total DNA sequencing reads since the non-targeted strand is unaffected by BE1. Values are shown from a single experiment. FIG. 37C shows HEK293T cells were transfected with plasmids expressing BE1 and an appropriate sgRNA. Three days after transfection, genomic DNA was extracted and analyzed by high-throughput DNA sequencing at the six loci. Cellular C to T conversion percentages, defined as the percentage of total DNA sequencing reads with Ts at the target positions indicated, are shown for BE1 at all six genomic loci. Values and error bars of all data from HEK293T cells reflect the mean and standard deviation of three independent biological replicates performed on different days. FIG. 37A depicts SEQ ID NOs: 127 to 132 from top to bottom, respectively. FIG. 37B depicts SEQ ID NOs: 127 to 132 from top to bottom, respectively.

[0081] FIG. 38 shows base editing persists over multiple cell divisions. Cellular C to T conversion percentages by BE2 and BE3 are shown for HEK293 sites 3 and 4 in HEK293T cells before and after passaging the cells. HEK293T cells were nucleofected with plasmids expressing BE2 or BE3 and an sgRNA targeting HEK293 site 3 or 4. Three days after nucleofection, the cells were harvested and split in half. One half was subjected to HTS analysis, and the other half was allowed to propagate for approximately five cell divisions, then harvested and subjected to HTS analysis. Values and error bars reflect the mean and standard deviation of at least two biological experiments.

[0082] FIGS. 39A to 39C show non-target C/G mutation rates. Shown here are the C to T and G to A mutation rates at 2,500 distinct cytosines and guanines surrounding the six on-target and 34 off-target loci tested, representing a total of 14,700,000 sequence reads derived from approximately 1.8×10⁶ cells. FIGS. 39A and 39B show cellular non-target C to T and G to A conversion percentages by BE1, BE2, and BE3 are plotted individually against their positions relative to a protospacer for all 2,500 cytosines/guanines. The side of the protospacer distal to the PAM is designated with positive numbers, while the side that includes the PAM is designated with negative numbers. FIG. 39C shows average non-target cellular C to T and G to A conversion percentages by BE1, BE2, and BE3 are shown, as well as the highest and lowest individual conversion percentages.

[0083] FIGS. 40A to 40B show additional data sets of BE3-mediated correction of two disease-relevant mutations in mammalian cells. For each site, the sequence of the protospacer is indicated to the right of the name of the mutation, with the PAM and the base responsible for the mutation indicated in red bold with a subscripted number corresponding to its position within the protospacer. The amino acid sequence above each disease-associated allele is shown, together with the corrected amino acid sequence following base editing. Underneath each sequence are the percentages of total sequencing reads with the corresponding base. Cells were nucleofected with plasmids encoding BE3 and an appropriate sgRNA. Two days after nucleofection, genomic DNA was extracted from the nucleofected cells and analyzed by HTS to assess pathogenic mutation correction. FIG. 40A shows the Alzheimer's disease-associated APOE4 allele is converted to APOE3r in mouse astrocytes by BE3 in 58.3% of total reads only when treated with the correct sgRNA. Two nearby Cs are also converted to Ts, but with no change to the predicted sequence of the resulting protein. Identical treatment of these cells with wt Cas9 and donor ssDNA results in 0.2% correction, with 26.7% indel formation. FIG. 40B shows the cancer-associated p53 Y163C mutation is corrected by BE3 in 3.3% of nucleofected human breast cancer cells only when treated with the correct sgRNA. Identical treatment of these cells with wt Cas9 and donor ssDNA results in no detectable mutation correction with 8.0% indel formation. FIGS. 40A to 40B depict SEQ ID NOs: 671, 627, 672 and 629.

[0084] FIG. 41 shows a schematic representation of an exemplary USER (Uracil-Specific Excision Reagent) Enzyme-based assay, which may be used to test the activity of various deaminases on single-stranded DNA (ssDNA) substrates.

[0085] FIG. 42 is a schematic of the pmCDA-nCas9-UGI-NLS construct and its activity at the HeK-3 site relative to the base editor (rAPOBEC1) and the negative control (untreated). This figure depicts SEQ ID NO: 693.

[0086] FIG. 43 is a schematic of the pmCDA1-XTEN-nCas9-UGI-NLS construct and its activity at the HeK-3 site relative to the base editor (rAPOBEC1) and the negative control (untreated). This figure depicts SEQ ID NO: 694.

[0087] FIG. 44 shows the percent of total sequencing reads with target C converted to T using cytidine deaminases (CDA) or APOBEC.

[0088] FIG. 45 shows the percent of total sequencing reads with target C converted to A using deaminases (CDA) or APOBEC.

[0089] FIG. 46 shows the percent of total sequencing reads with target C converted to G using deaminases (CDA) or APOBEC.

[0090] FIG. 47 is a schematic of the huAPOBEC3G-XTEN-nCas9-UGI-NLS construct and its activity at the HeK-2 site relative to a mutated form (huAPOBEC3G*(D316R_D317R)-XTEN-nCas9-UGI-NLS, the base editor (rAPOBEC1) and the negative control (untreated). This figure depicts SEQ ID NO: 695.

[0091] FIG. 48 shows the schematic of the LacZ construct used in the selection assay of Example 7.

[0092] FIG. 49 shows reversion data from different plasmids and constructs.

[0093] FIG. 50 shows the verification of lacZ reversion and the purification of reverted clones.

[0094] FIG. 51 is a schematic depicting a deamination selection plasmid used in Example 7.

[0095] FIG. 52 shows the results of a chloramphenicol reversion assay (pmCDA1 fusion).

[0096] FIGS. 53A to 53B demonstrated DNA correction induction of two constructs.

[0097] FIG. 54 shows the results of a chloramphenicol reversion assay (huAPOBEC3G fusion).

[0098] FIG. 55 shows the activities of BE3 and HF-BE3 at EMX1 off-targets. The sequences, from top to bottom, correspond to SEQ ID NOs: 127 and 637-645.

[0099] FIG. 56 shows on-target base editing efficiencies of BE3 and HF-BE3.

[0100] FIG. 57 is a graph demonstrating that mutations affect cytidine deamination with varying degrees. Combinations of mutations that each slightly impairs catalysis allow selective deamination at one position over others. The FANCF site was GGAATC₆C₇C₈TTC₁₁TGCAGCACCTGG (SEQ ID NO: 128).

[0101] FIG. 58 is a schematic depicting next generation base editors.

[0102] FIG. 59 is a schematic illustrating new base editors made from Cas9 variants.

[0103] FIG. 60 shows the base-edited percentage of different NGA PAM sites.

[0104] FIG. 61 shows the base-edited percentage of cytidines using NGCG PAM EMX (VRER BE3) and the C₁TC₃C₄C₅ATC₈AC₁₀ATCAACCGGT (SEQ ID NO: 696) spacer.

[0105] FIG. 62 shows the based-edited percentages resulting from different NNGRRT PAM sites.

[0106] FIG. 63 shows the based-edited percentages resulting from different NNHRRT PAM sites.

[0107] FIGS. 64A to 64C show the base-edited percentages resulting from different TTTN PAM sites using Cpf1 BE2. The spacers used were: TTTCCTC₃C₄C₅C₆C₇C₈C₉AC₁₁AGGTAGAACAT (FIG. 64A, SEQ ID NO: 697), TTTCC₁C₂TC₄TGTC₈C₉AC₁₁ACCCTCATCCTG (FIG. 64B, SEQ ID NO: 698), and TTTCC₁C₂C₃AGTC₇C₈TC₁₀C₁₁AC_{B}AC₁₅C₁₆C₁₇TGAAAC (FIG. 64C, SEQ ID NO: 699).

[0108] FIG. 65 is a schematic depicting selective deamination as achieved through kinetic modulation of cytidine deaminase point mutagenesis.

[0109] FIG. 66 is a graph showing the effect of various mutations on the deamination window probed in cell culture with multiple cytidines in the spacer. The spacer used was: TGC₃C₄C₅C₆TC₈C₉C₁₀TC₁₂C₁₃C₁₄TGGCCC (SEQ ID NO: 700).

[0110] FIG. 67 is a graph showing the effect of various mutations on the deamination window probed in cell culture with multiple cytidines in the spacer. The spacer used was: AGAGC₅C₆C₇C₈C₉C₁₀C₁₁TC₁₃AAAGAGA (SEQ ID NO: 701).

[0111] FIG. 68 is a graph showing the effect of various mutations on the FANCF site with a limited number of cytidines. The spacer used was: GGAATC₆C₇C₈TTC₁₁TGCAGCACCTGG (SEQ ID NO: 128). Note that the triple mutant (W90Y, R126E, R132E) preferentially edits the cytidine at the sixth position.

[0112] FIG. 69 is a graph showing the effect of various mutations on the HEK3 site with a limited number of cytidines. The spacer used was: GGCC₄C₅AGACTGAGCACGTGATGG (SEQ ID NO: 702). Note that the double and triple mutants preferentially edit the cytidine at the fifth position over the cytidine in the fourth position.

[0113] FIG. 70 is a graph showing the effect of various mutations on the EMX1 site with a limited number of cytidines. The spacer used was: GAGTC₅C₆GAGCAGAAGAAGAAGGG (SEQ ID NO: 703). Note that the triple mutant only edits the cytidine at the fifth position, not the sixth.

[0114] FIG. 71 is a graph showing the effect of various mutations on the HEK2 site with a limited number of cytidines. The spacer used was: GAAC₄AC₆AAAGCATAGACTGCGGG (SEQ ID NO: 704).

[0115] FIG. 72 shows on-target base editing efficiencies of BE3 and BE3 comprising mutations W90Y R132E in immortalized astrocytes.

[0116] FIG. 73 depicts a schematic of three Cpf1 fusion constructs.

[0117] FIG. 74 shows a comparison of plasmid delivery of BE3 and HF-BE3 (EMX1, FANCF, and RNF2).

[0118] FIG. 75 shows a comparison of plasmid delivery of BE3 and HF-BE3 (HEK3 and HEK 4).

[0119] FIG. 76 shows off-target editing of EMX-1 at all 10 sites. This figure depicts SEQ ID NOs: 127 and 637-645

[0120] FIG. 77 shows deaminase protein lipofection to HEK cells using a GAGTCCGAGCAGAAGAAGAAG (SEQ ID NO: 705) spacer. The EMX-1 on-target and EMX-1 off target site 2 were examined.

[0121] FIG. 78 shows deaminase protein lipofection to HEK cells using a GGAATCCCTTCTGCAGCACCTGG (SEQ ID NO: 706) spacer. The FANCF on target and FANCF off target site 1 were examined.

[0122] FIG. 79 shows deaminase protein lipofection to HEK cells using a GGCCCAGACTGAGCACGTGA (SEQ ID NO: 707) spacer. The HEK-3 on target site was examined.

[0123] FIG. 80 shows deaminase protein lipofection to HEK cells using a GGCACTGCGGCTGGAGGTGGGGG (SEQ ID NO: 708) spacer. The HEK-4 on target, off target site 1, site 3, and site 4.

[0124] FIG. 81 shows the results of an in vitro assay for sgRNA activity for sgHR_13 (GTCAGGTCGAGGGTTCTGTC (SEQ ID NO: 709) spacer; C8 target: G51 to STOP), sgHR_14 (GGGCCGCAGTATCCTCACTC (SEQ ID NO: 710) spacer; C7 target; C7 target: Q68 to STOP), and sgHR_15 (CCGCCAGTCCCAGTACGGGA (SEQ ID NO: 711) spacer; C10 and C11 are targets: W239 or W237 to STOP).

[0125] FIG. 82 shows the results of an in vitro assay for sgHR_17 (CAACCACTGCTCAAAGATGC (SEQ ID NO: 712) spacer; C4 and C5 are targets: W410 to STOP), and sgHR_16 (CTTCCAGGATGAGAACACAG (SEQ ID NO: 713) spacer; C4 and C5 are targets: W273 to STOP).

[0126] FIG. 83 shows the direct injection of BE3 protein complexed with sgHR_13 in zebrafish embryos.

[0127] FIG. 84 shows the direct injection of BE3 protein complexed with sgHR_16 in zebrafish embryos.

[0128] FIG. 85 shows the direct injection of BE3 protein complexed with sgHR_17 in zebrafish embryos.

[0129] FIG. 86 shows exemplary nucleic acid changes that may be made using base editors that are capable of making a cytosine to thymine change.

[0130] FIG. 87 shows an illustration of apolipoprotein E (APOE) isoforms, demonstrating how a base editor (e.g., BE3) may be used to edit one APOE isoform (e.g., APOE4) into another APOE isoform (e.g., APOE3r) that is associated with a decreased risk of Alzheimer's disease.

[0131] FIG. 88 shows base editing of APOE4 to APOE3r in mouse astrocytes. This figure depicts SEQ ID Nos: 671 and 627.

[0132] FIG. 89 shows base editing of PRNP to cause early truncation of the protein at arginine residue 37. This figure depicts SEQ ID Nos: 577 and 714.

[0133] FIG. 90 shows that knocking out UDG (which UGI inhibits) dramatically improves the cleanliness of efficiency of C to T base editing.

[0134] FIG. 91 shows that use of a base editor with the nickase but without UGI leads to a mixture of outcomes, with very high indel rates.

[0135] FIGS. 92A to 92G show that SaBE3, SaKKH-BE3, VQR-BE3, EQR-BE3, and VRER-BE3 mediate efficient base editing at target sites containing non-NGG PAMs in human cells. FIG. 92A shows base editor architectures using S. pyogenes and S. aureus Cas9. FIG. 92B shows recently characterized Cas9 variants with alternate or relaxed PAM requirements. FIGS. 92C and 92D show HEK293T cells treated with the base editor variants shown as described in Example 12. The percentage of total DNA sequencing reads (with no enrichment for transfected cells) with C converted to T at the target positions indicated are shown. The PAM sequence of each target tested is shown below the X-axis. The charts show the results for SaBE3 and SaKKH-BE3 at genomic loci with NNGRRT PAMs (FIG. 92C), SaBE3 and SaKKH-BE3 at genomic loci with NNNRRT PAMs (FIG. 92D), VQR-BE3 and EQR-BE3 at genomic loci with NGAG PAMs (FIG. 92E), and with NGAH PAMs (FIG. 92F), and VRER-BE3 at genomic loci with NGCG PAMs (FIG. 92G). Values and error bars reflect the mean and standard deviation of at least two biological replicates.

[0136] FIGS. 93A to 93C demonstrate that base editors with mutations in the cytidine deaminase domain exhibit narrowed editing windows. FIGS. 93A to 93C show HEK293T cells transfected with plasmids expressing mutant base editors and an appropriate sgRNA. Three days after transfection, genomic DNA was extracted and analyzed by high-throughput DNA sequencing at the indicated loci. The percentage of total DNA sequencing reads (without enrichment for transfected cells) with C changed to T at the target positions indicated are shown for the EMX1 site (SEQ ID NO: 721), HEK293 site 3 (SEQ ID NO: 719), FANCF site (SEQ ID NO: 722), HEK293 site 2 (SEQ ID NO: 720), site A (SEQ ID NO: 715), and site B (SEQ ID NO: 718) loci. FIG. 93A illustrates certain cytidine deaminase mutations which narrow the base editing window. See FIG. 98 for the characterization of additional mutations. FIG. 93B shows the effect of cytidine deaminase mutations which effect the editing window width on genomic loci. Combining beneficial mutations has an additive effect on narrowing the editing window. FIG. 93C shows that YE1-BE3, YE2-BE3, EE-BE3, and YEE-BE3 effect the product distribution of base editing, producing predominantly singly-modified products in contrast with BE3. Values and error bars reflect the mean and standard deviation of at least two biological replicates.

[0137] FIGS. 94A and 94B show genetic variants from ClinVar that in principle can be corrected by the base editors developed in this work. The NCBI ClinVar database of human genetic variations and their corresponding phenotypes was searched for genetic diseases that in theory can be corrected by base editing. FIG. 94A demonstrates improvement in base editing targeting scope among all pathogenic T→C mutations in the ClinVar database through the use of base editors with altered PAM specificities. The white fractions denote the proportion of pathogenic T→C mutations accessible on the basis of the PAM requirements of either BE3, or BE3 together with the five modified-PAM base editors developed in this work. FIG. 94B shows improvement in base editing targeting scope among all pathogenic T→C mutations in the ClinVar database through the use of base editors with narrowed activity windows. BE3 was assumed to edit Cs in positions 4-8 with comparable efficiency as shown in FIGS. 93A to 93C. YEE-BE3 was assumed to edit with C5>C6>C7>others preference within its activity window. The white fractions denote the proportion of pathogenic T→C mutations that can be edited BE3 without comparable editing of other Cs (left), or that can be edited BE3 or YEE-BE3 without comparable editing of other Cs (right).

[0138] FIGS. 95A to 95B show the effect of truncated guide RNAs on base editing window width. HEK293T cells were transfected with plasmids expressing BE3 and sgRNAs of different 5′ truncation lengths. The treated cells were analyzed as described in the Examples. FIG. 95A shows protospacer and PAM sequence (top, SEQ ID NO: 715) and cellular C to T conversion percentages, defined as the percentage of total DNA sequencing reads with Ts at the target positions indicated, at a site within the EMX1 genomic locus. At this site, the base editing window was altered through the use of a 17-nt truncated gRNA. FIG. 95B shows protospacer and PAM sequences (top, SEQ ID NOs: 715 and 716) and cellular C to T conversion percentages, defined as the percentage of total DNA sequencing reads with Ts at the target positions indicated, at sites within the HEK site 3 and site 4 genomic loci. At these sites, no change in the base editing window was observed, but a linear decrease in editing efficiency for all substrate bases as the sgRNA is truncated was noted.

[0139] FIG. 96 shows the effect of APOBEC1-Cas9 linker lengths on base editing window width. HEK293T cells were transfected with plasmids expressing base editors with rAPOBEC1-Cas9 linkers of XTEN, GGS, (GGS)₃ (SEQ ID NO: 610), (GGS)₅ (SEQ ID NO: 610), or (GGS)₇ (SEQ ID NO: 610) and an sgRNA. The treated cells were analyzed as described in the Examples. Cellular C to T conversion percentages, defined as the percentage of total DNA sequencing reads with Ts at the target positions indicated, are shown for the various base editors with different linkers.

[0140] FIGS. 97A to 97C show the effect of rAPOBEC mutations on base editing window width. FIG. 97C shows HEK293T cells transfected with plasmids expressing an sgRNA targeting either Site A or Site B and the BE3 point mutants indicated. The treated cells were analyzed as described in the Examples. All C's in the protospacer and within three basepairs of the protospacer are displayed and the cellular C to T conversion percentages are shown. The ‘editing window widths’, defined as the calculated number of nucleotides within which editing efficiency exceeds the half-maximal value, are displayed for all tested mutants.

[0141] FIG. 98 shows the effect of APOBEC1 mutation son product distributions of base editing in mammalian cells. HEK293T cells were transfected with plasmids expressing BE3 or its mutants and an appropriate sgRNAs. The treated cells were analyzed as described in the Examples. Cellular C to T conversion percentages, defined as the percentage of total DNA sequencing reads with Ts at the target positions indicated, are shown (left). Percent of total sequencing reads containing the C to T conversion is shown on the right. The BE3 point mutants do not significantly affect base editing efficiencies at HEK site 4, a site with only one target cytidine.

[0142] FIG. 99 shows a comparison of on-target editing plasma delivery in BE3 and HF-BE3.

[0143] FIG. 100 shows a comparison of on-target editing in protein and plasma delivery of BE3.

[0144] FIG. 101 shows a comparison of on-target editing in protein and plasma devliery of HF-BE3.

[0145] FIG. 102 shows that both lipofection and installing HF mutations decrease off-target deamination events. The diamond indicates no off targets were detected and the specificity ratio was set to 100.

[0146] FIG. 103 shows in vitro C to T editing on a synthetic substrate with Cs placed at even positions in the protospacer (NNNNTC₂TC₄TC₆TC₈TC₁₀TC₁₂TC₁₄TC₁₆TC₁₈TC₂₀NGG, SEQ ID NO: 723).

[0147] FIG. 104 shows in vitro C to T editing on a synthetic substrate with Cs placed at odd positions in the protospacer (NNNNTC₂TC₄TC₆TC₈TC₁₀TC₁₂TC₁₄TC₁₆TC₁₈TC₂₀NGG, SEQ ID NO: 723).

[0148] FIG. 105 includes two graphs depicting the specificity ratio of base editing with plasmid vs. protein delivery.

[0149] FIGS. 106A to 106B shows BE3 activity on non-NGG PAM sites. HEK293T cells were transfected with plasmids expressing BE3 and appropriate sgRNA. The treated cells were analyzed as described in the Examples. FIG. 106A shows BE3 activity on sites can be efficiently targeted by SaBE3 or SaKKH-BE3. BE3 shows low but significant activity on the NAG PAM. This figure depicts SEQ ID NOs: 728 and 729. FIG. 106B shows BE3 has significantly reduced editing at sites with NGA or NGCG PAMs, in contrast to VQR-BE3 or VRER-BE3. This figure depicts SEQ ID NOs: 730 and 731.

[0150] FIGS. 107A to 107B show the effect of APOBEC1 mutations on VQR-BE3 and SaKKH-BE3. HEK293T cells were transfected with plasmids expressing VQR-BE3, SaKKH-BE3 or its mutants and an appropriate sgRNAs. The treated cells were analyzed as described in the Examples below. Cellular C to T conversion percentages, defined as the percentage of total DNA sequencing reads with Ts at the target positions indicated, are shown. FIG. 107A shows that the window-modulating mutations can be applied to VQR-BE3 to enable selective base editing at sites targetable by NGA PAM. This figure depicts SEQ ID NOs: 732 and 733. FIG. 107B shows that, when applied to SaKKH-BE3, the mutations cause overall decrease in base editing efficiency without conferring base selectivity within the target window. This figure depicts SEQ ID NOs: 728 and 734.

[0151] FIG. 108 shows a schematic representation of nucleotide editing. The following abbreviations are used: (MMR)—mismatch repair, (BE3 Nickase)—refers to base editor 3, which comprises a Cas9 nickase domain, (UGI)—uracil glycosylase inhibitor, (UDG)—uracil DNA glycosylase, (APOBEC)—refers to an APOBEC cytidine deaminase.

[0152] FIG. 109 shows schematic representations of exemplary base editing constructs. The structural arrangement of base editing constructs is shown for BE3, BE4-pmCDA1, BE4-hAID, BE4-3G, BE4-N, BE4-SSB, BE4-(GGS)₃, BE4-XTEN, BE4-32aa, BE4-2×UGI, and BE4. Linkers are shown in grey (XTEN, SGGS (SEQ ID NO: 606), (GGS)₃ (SEQ ID NO: 610), and 32aa). Deaminases are shown (rAPOBEC1, pmCDA1, hAID, and hAPOBEC3G). Uracil DNA Glycosylase Inhibitor (UGI) is shown. Single-stranded DNA binding protein (SSB) is shown in purple. Cas9 nickase, dCas9(A840H), is shown in red. FIG. 109 also shows the following target sequences: EMX1, FANCF, HEK2, HEK3, HEK4, and RNF2. The amino acid sequences are indicated in SEQ ID NOs: 127-132 from top to bottom. The PAM sequences are the last three nucleotides. The target cytosine (C) is numbered and indicated in red.

[0153] FIG. 110 shows the base editing results for the indicated base editing constructs (BE3, pmCDA1 hAID, hAPOBEC3G, BE4-N, BE4-SSB, BE4-(GGS)₃, BE-XTEN, BE4-32aa, and BE4-2×UGI) on the targeted cytoine (C₅) of the EMX1 sequence, GAGTC₅CGAGCAGAAGAAGAAGGG (SEQ ID NO: 127). The total percentage of targeted cytosines (C₅) that were mutated is indicated for each base editing construct, under “C₅”. The total percentage of indels is indicated for each base editing construct, under “indel”. The proportion of mutated cytosines that were mutated to an adenine (A), guanine (G), or thymine (T) are indicated for each base editing construct in the pie chart.

[0154] FIG. 111 shows the base editing results for the indicated base editing constructs (BE3, pmCDA1 hAID, hAPOBEC3G, BE4-N, BE4-SSB, BE4-(GGS)₃, BE-XTEN, BE4-32aa, and BE4-2×UGI) on the targeted cytoine (C₈) of the FANCF sequence, GGAATCCC₈TTCTGCAGCACCTGG (SEQ ID NO: 128). The total percentage of targeted cytosines (C₈) that were mutated are indicated for each base editing construct, under “C₈”. The total percentage of indels are indicated for each base editing construct, under “indel”. The proportion of mutated cytosines that were mutated to an adenine (A), guanine (G), or thymine (T) are indicated for each base editing construct in the pie chart.

[0155] FIG. 112 shows the base editing results for the indicated base editing constructs (BE3, pmCDA1 hAID, hAPOBEC3G, BE4-N, BE4-SSB, BE4-(GGS)₃, BE-XTEN, BE4-32aa, and BE4-2×UGI) on the targeted cytoine (C₆) of the HEK2 sequence, GAACAC₆AAAGCATAGACTGCGGG (SEQ ID NO: 129). The total percentage of targeted cytosines (C₆) that were mutated are indicated for each base editing construct, under “C₆”. The total percentage of indels are indicated for each base editing construct, under “indel”. The proportion of mutated cytosines that were mutated to an adenine (A), guanine (G), or thymine (T) are indicated for each base editing construct in the pie chart.

[0156] FIG. 113 shows the base editing results for the indicated base editing constructs (BE3, pmCDA1 hAID, hAPOBEC3G, BE4-N, BE4-SSB, BE4-(GGS)₃, BE-XTEN, BE4-32aa, and BE4-2×UGI) on the targeted cytoine (C₅) of the HEK3 sequence, GGCCC₅AGACTGAGCACGTGATGG (SEQ ID NO: 130). The total percentage of targeted cytosines (C₅) that were mutated are indicated for each base editing construct, under “C₅.”. The total percentage of indels are indicated for each base editing construct, under “indel”. The proportion of mutated cytosines that were mutated to an adenine (A), guanine (G), or thymine (T) are indicated for each base editing construct in the pie chart.

[0157] FIG. 114 shows the base editing results for the indicated base editing constructs (BE3, pmCDA1 hAID, hAPOBEC3G, BE4-N, BE4-SSB, BE4-(GGS)₃, BE-XTEN, BE4-32aa, and BE4-2×UGI) on the targeted cytoine (C₅) of the HEK4 sequence, GGCAC₅TGCGGCTGGAGGTCCGGG (SEQ ID NO: 131). The total percentage of targeted cytosines (C₅) that were mutated are indicated for each base editing construct, under “C₅.”. The total percentage of indels are indicated for each base editing construct, under “indel”. The proportion of mutated cytosines that were mutated to an adenine (A), guanine (G), or thymine (T) are indicated for each base editing construct in the pie chart.

[0158] FIG. 115 shows the base editing results for the indicated base editing constructs (BE3, pmCDA1 hAID, hAPOBEC3G, BE4-N, BE4-SSB, BE4-(GGS)₃, BE-XTEN, BE4-32aa, and BE4-2×UGI) on the targeted cytoine (C₆) of the RNF2 sequence, GTCATC₆TTAGTCATTACCTGAGG (SEQ ID NO: 132). The total percentage of targeted cytosines (C₆) that were mutated are indicated for each base editing construct, under “C₆.”. The total percentage of indels are indicated for each base editing construct, under “indel”. The proportion of mutated cytosines that were mutated to an adenine (A), guanine (G), or thymine (T) are indicated for each base editing construct in the pie chart.

[0159] FIG. 116 shows exemplary fluorescent labeled (Cy3 labeled) DNA constructs used to test for Cpf1 mutants that nick the target strand. In the DNA construct of 1, both the non-target strand (top strand) and target strand (bottom strand) are fluorescently labeled. In the DNA construct of 2, the non-target strand (top strand) is fluorescently labeled and the target strand (bottom strand) is not fluorescently labeled. In the DNA construct of 3, the non-target strand (top strand) is not fluorescently labeled and the target strand (bottom strand) is fluorescently labeled.

[0160] FIG. 117 shows data demonstrating the ability of various Cpf1 constructs (e.g., R836A, R1138A, wild-type) to cleave the target and non-target strands of the DNA constructs shown in FIG. 116 over the reaction time of either 30 minutes (30 min) or greater than two hours (2 h+).

[0161] FIG. 118 shows data demonstrating that a base editor having the architecture, APOBEC-AsCpf1(R912A)-UGI is capable of editing C residues (e.g., of target sequences FANCF1, FANCF2, HEK3-3, and HEK3-4) having a window from the 7^{th} to the 11^{th} base of the target sequence. BG indicates background mutation levels (untreated). AsCpf1 indicates AsCpf1 only treated (control), APOBEC-AsCpf1(R912A)-UGI indicates a base editor containing a Cpf1 that preferentially cuts the target strand, and APOBEC-AsCpf1(R1225A)-UGI indicates a self-defeating base editor containing a Cpf1 that cuts the non-target strand. The target sequences of FANCF1, FANCF2, HEK3-3, and HEK3-4 are as follows:

FANCF1

(SEQ ID NO: 724)

GCGGATGTTCCAATCAGTACGCA
FANCF2

(SEQ ID NO: 725)

CGAGCTTCTGGCGGTCTCAAGCA
HEK3-3

(SEQ ID NO: 726)

TGCTTCTCCAGCCCTGGCCTGG
HEK3-4

(SEQ ID NO: 727)

AGACTGAGCACGTGATGGCAGAG

[0162] FIG. 119 shows a schematic representation of a base editor comprising a Cpf1 protein (e.g., AsCpf1 or LbCpf1). Different linker sequences (e.g., XTEN, GGS, (GGS)₃ (SEQ ID NO: 610), (GGS)₅ (SEQ ID NO: 610), and (GGS)₇ (SEQ ID NO: 610)) were tested for the portion labeled “linker,” results of which are shown in FIG. 120.

[0163] FIG. 120 shows data demonstrating the ability of the construct shown in FIG. 119 to edit the C₈ residue of the HEK3 site TGCTTCTC₈CAGCCCTGGCCTGG (SEQ ID NO: 592). Different linker sequences, which link the APOBEC domain to the Cpf1 domain (e.g., LbCpf1(R836A) or AsCpf1(R912A)) were tested. Exemplary linkers that were tested include XTEN, GGS, (GGS)₃ (SEQ ID NO: 610), (GGS)₅ (SEQ ID NO: 610), and (GGS)₇ (SEQ ID NO: 610).

[0164] FIG. 121 shows data demonstrating the ability of the construct shown in FIG. 119, having the LbCpf1 domain, to edit the C₈ and C₉ residues of the HEK3 TGCTTCTC₈C₉AGCCCTGGCCTGG (SEQ ID NO: 592). Different linker sequences from a database maintained by the Centre of Integrative Bioinformatics VU, which link the APOBEC domain to the LbCpf1 domain were tested. Exemplary linkers that were tested include 1au7, 1c1k, 1c20, 1ee8, 1flz, 1ign, 1jmc, 1sfe, 2ezx, and 2reb.

[0165] FIG. 122 shows a schematic representation of the structure of AsCpf1, where the N and C termini are indicated.

[0166] FIG. 123 shows a schematic representation of the structure of SpCas9, where the N and C termini are indicated.

[0167] FIG. 124 shows a schematic representation of AsCpf1, where the red circle indicates the predicted area where the editing window is. The square indicates a helical region that may be obstructing APOBEC activity.

[0168] FIGS. 125A and 125B show engineering and in vitro characterization of a high fidelity base editor (HF-BE3). FIG. 125A shows a schematic representation of HF-BE3. Point mutations introduced into BE3 to generate HF-BE3 are shown. The representation used PDB structures 4UN3 (Cas9), 4ROV (cytidine deaminase) and 1UGI (uracil DNA glycosylase inhibitor). FIG. 125B shows in vitro deamination of synthetic substrates containing ‘TC’ repeat protospacers. Values and error bars reflect mean and range of two independent replicates performed on different days.

[0169] FIGS. 126A to 126C show purification of base editor proteins. FIG. 126A shows selection of optimal E. coli strain for base editor expression. After IPTG-induced protein expression for 16 h at 18° C., crude cell lysate was analyzed for protein content. BL21 Star (DE3) (Thermo Fisher) cells showed the most promising post-expression levels of both BE3 and HF-BE3 and were used for expression of base editors. FIG. 126B shows purification of expressed base editor proteins. Placing the His6 tag on the C-terminus of the base editors lead to production of a truncation product for both BE3 and HF-BE3 (lanes 1 and 2). Unexpectedly, this truncation product was removed by placing the His6 tag on the N-terminus of the protein (lanes 3-6). Inducing expression of base editors at a cell density of OD600=0.7 (lanes 4-5), later than is optimal for Cas9 expression (OD600=0.4)1, improves yield of base editor proteins. Purification was performed using a manual HisPur resin column followed by cation exchange FPLC (Akta). FIG. 126C shows purified BE3 and HF-BE3. Different concentrations of purified BE3 and HF-BE3 were denatured using heat and LDS and loaded onto a polyacrylamide gel. Protein samples are representative of proteins used in this study. Gels in FIGS. 126A to 126C are BOLT Bis-Tris Plus 4-12% polyacrylamide (Thermo Fisher). Electrophoresis and staining were performed as described in Methods.

[0170] FIGS. 127A to 127D show activity of a high fidelity base editor (HF-BE3) in human cells. FIGS. 127A to 127C show on- and off-target editing associated with plasmid transfection of BE3 and HF-BE3 was assayed using high-throughput sequencing of genomic DNA from HEK293T cells treated with sgRNAs targeting non-repetitive genomic loci EMX1 (FIG. 127A), FANCF (FIG. 127B), and HEK293 site 3 (FIG. 127C). On- and off-target loci associated with each sgRNA are separated by a vertical line. FIG. 127D shows on- and off-target editing associated with the highly repetitive sgRNA targeting VEGFA site 2. Values and error bars reflect mean±S.D. of three independent biological replicates performed on different days. For FIGS. 127A to 127C, stars indicate significant editing based on a comparison between the treated sample and an untreated control. *p≤0.05, **p≤0.01 and ***p≤0.001 (Student's two tailed t-test). For FIG. 127D, asterisks are not shown since all treated samples displayed significant editing relative to the control. Individual p-values are listed in in Table 16.

[0171] FIGS. 128A to 128C show the effect of dosage of BE3 protein or plasmid on the efficiency of on-target and off-target base editing in cultured human cells. FIG. 128A shows on-target editing efficiency at each of the four genomic loci was averaged across all edited cytosines in the activity window for each sgRNA. Values and error bars reflect mean±S.E.M of three independent biological replicates performed on different days. FIGS. 128B and 128C show on- and off-target editing at the EMX1 site arising from BE3 plasmid titration (FIG. 128B) or BE3 protein titration (FIG. 128C) in HEK293T cells. Values and error bars reflect mean±S.D. of three independent biological replicates performed on different days.

[0172] FIGS. 129A to 129B show on-target:off-target base editing frequency ratios for plasmid and protein delivery of BE3 and HF-BE3. Base editing on-target:off-target specificity ratios were calculated by dividing the on-target editing percentage at a particular cytosine in the activity window by the off-target editing percentage at the corresponding cytosine for the indicated off-target locus (see Methods). When off-target editing was below the threshold of detection (0.025% of sequencing reads), we set the off-target editing to the limit of detection (0.025%) and divided the on-target editing percentage by this upper limit. In these cases, denoted by ♦, the specificity ratios shown represent lower limits. Specificity ratios are shown for non-repetitive sgRNAs FANCF, HEK 293 site 3, and FANCF (FIG. 129A) and for the highly repetitive sgRNA VEGFA site 2 (FIG. 129B). Values and error bars reflect mean±S.D. of three independent biological replicates performed on different days.

[0173] FIGS. 130A to 130D show protein delivery of base editors into cultured human cells. FIGS. 130A to 130D show on- and off-target editing associated with RNP delivery of base editors complexed with sgRNAs targeting EMX1 (FIG. 130A), FANCF (FIG. 130B), HEK293 site 3 (FIG. 130C) and VEGFA site 2 (FIG. 130D). Off-target base editing was undetectable at all of the sequenced loci for non-repetitive sgRNAs. Values and error bars reflect mean±S.D. of three independent biological replicates performed on different days. Stars indicate significant editing based on a comparison between the treated sample and an untreated control. *p≤0.05, **p≤0.01 and ***p≤0.001 (Student's two tailed t-test).

[0174] FIGS. 131A to 131C show indel formation associated with base editing at genomic loci. FIG. 131A shows indel frequency at on-target loci for VEGFA site 2, EMX1, FANCF, and HEK293 site 3 sgRNAs. FIG. 131B shows the ratio of base editing:indel formation. The diamond (♦) indicates no indels were detected (no significant difference in indel frequency in the treated sample and in the untreated control). FIG. 131C shows indels observed at the off-target loci associated with the on-target sites interrogated in FIG. 131A. Values and error bars reflect mean±S.D. of three independent biological replicates performed on different days.

[0175] FIGS. 132A to 132D show DNA-free in vivo base editing in zebrafish embryos and in the inner ear of live mice using RNP delivery of BE3. FIG. 132A shows on-target genome editing in zebrafish harvested 4 days after injection of BE3 complexed with indicated sgRNA. Values and error bars reflect mean±s.d. of three injected and three control zebrafish. Controls were injected with BE3 complexed with an unrelated sgRNA. FIG. 132B shows schematic showing in vivo injection of BE3:sgRNA complexes encapsulated into cationic lipid nanoparticles FIG. 132C shows base editing of cytosine residues in the base editor window at the VEGFA site 2 genomic locus. FIG. 132D shows on-target editing at each cytosine in the base editing window of the VEGFA site 2 target locus. FIG. 132D (FIGS. 132C and 132D) shows values and error bars reflect mean±S.E.M. of three mice injected with sgRNA targeting VEGFA Site 2, three uninjected mice and one mouse injected with unrelated sgRNA.

[0176] FIGS. 133A to 133E show on- and off-target base editing in murine NIH/3T3 cells. FIG. 133A shows on-target base editing associated with the ‘VEGFA site 2’ sgRNA (See FIG. 132E for sequences). The negative control corresponds to cells treated with plasmid encoding BE3 but no sgRNA. Values and error bars reflect mean±S.D. of three independent biological replicates performed on different days. FIGS. 133B to 133E show off-target editing associated with this site was measured using high-throughput DNA sequencing at the top four predicted off-target loci for this sgRNA (sequences shown in FIG. 132E). FIG. 133B shows off-target 2, FIG. 133C shows off-target 1, FIG. 133D shows off-target 3, FIG. 133E shows off-target 4. Values and error bars reflect mean±S.D. of three independent biological replicates performed on different days.

[0177] FIGS. 134A to 134B show off-target base editing and on-target indel analysis from in vivo-edited murine tissue. FIG. 134A shows editing plotted for each cytosine in the base editing window of off-target loci associated with VEGFA site 2. FIG. 134B shows indel rates at the on-target base editor locus. Values and error bars reflect mean±S.E.M of three injected and three control mice.

[0178] FIGS. 135A to 135C show the effects on base editing product purity of knocking out UNG. FIG. 135A shows HAP1 (UNG⁺) and HAP1 UNG⁻ cells treated with BE3 as described in the Materials and Methods of Example 17. The product distribution among edited DNA sequencing reads (reads in which the target C is mutated) is shown. FIG. 135B shows protospacers and PAM sequences of the genomic loci tested, with the target Cs analyzed in FIG. 135A shown in red. FIG. 135C shows the frequency of indel formation following treatment with BE3 in HAP1 cells or HAP1 UNG⁻ cells. Values and error bars reflect the mean±S.D. of three independent biological replicates performed on different days.

[0179] FIGS. 136A to 136D show the effects of multi-C base editing on product purity. FIG. 136A shows representative high-throughput sequencing data of untreated, BE3-treated, and AID-BE3-treated human HEK293T cells. The sequence of the protospacer is shown at the top, with the PAM and the target Cs in red with subscripted numbers indicating their position within the protospacer. Underneath each sequence are the percentages of total sequencing reads with the corresponding base. The relative percentage of target Cs that are cleanly edited to T rather than to non-T bases is much higher for AID-BE3-treated cells, which edits three Cs at this locus, than for BE3-treated cells, which edits only one C. FIG. 136B shows HEK293T cells treated with BE3, CDA1-BE3, and AID-BE3 as described in the Materials and Methods of Example 17. The product distribution among edited DNA sequencing reads (reads in which the target C is mutated) is shown. FIG. 136C shows protospacers and PAM sequences of genomic loci studied, with the target Cs that are analyzed in FIG. 136B shown in red. FIG. 136D shows the frequency of indel formation following the treatment shown in FIG. 136A. Values and error bars reflect the mean±S.D. of three independent biological replicates performed on different days.

[0180] FIGS. 137A to 137C show the effects on C-to-T editing efficiencies and product purities of changing the architecture of BE3. FIG. 137A shows protospacers and PAM sequences of genomic loci studied, with the target Cs in FIG. 137C shown in purple and red, and the target Cs in FIG. 137B shown in red. FIG. 137B shows HEK293T cells treated with BE3, SSB-BE3, N-UGI-BE3, and BE3-2×UGI as described in the Materials and Methods of Example 17. The product distribution among edited DNA sequencing reads (reads in which the target C is mutated) is shown for BE3, N-UGI-BE3, and BE3-2×UGI. FIG. 137C shows C-to-T base editing efficiencies. Values and error bars reflect the mean±S.D. of three independent biological replicates performed on different days.

[0181] FIGS. 138A to 138D show the effects of linker length variation in BE3 on C-to-T editing efficiencies and product purities. FIG. 138A shows the architecture of BE3, BE3C, BE3D, and BE3E FIG. 138B shows protospacers and PAM sequences of genomic loci studied, with the target Cs in FIG. 138C shown in purple and red, and target Cs in FIG. 138D shown in red. FIG. 138C shows HEK293T cells treated with BE3, BE3C, BE3D, or BE3E as described in the Materials and Methods of Example 17. C-to-T base editing efficiencies are shown. FIG. 138D shows the product distribution among edited DNA sequencing reads (reads in which the target C is mutated) for BE3, BE3C, BE3D, and BE3E. Values and error bars reflect the mean±S.D. of three independent biological replicates performed on different days.

[0182] FIGS. 139A to 139D show BE4 increases base editing efficiency and product purities compared to BE3. FIG. 139A shows the architectures of BE3, BE4, and Target-AID. FIG. 139B shows protospacers and PAM sequences of genomic loci studied, with the target Cs in FIG. 139C shown in purple and red, and the target Cs in FIG. 139D shown in red. FIG. 139C shows HEK293T cells treated with BE3, BE4, or Target-AID as described in the Materials and Methods of Example 17. C-to-T base editing efficiencies are shown. FIG. 139D shows the product distribution among edited DNA sequencing reads (reads in which the target C is mutated) for BE3 and BE4. Values and error bars reflect the mean±S.D. of three independent biological replicates performed on different days.

[0183] FIGS. 140A to 140C show CDA1-BE3 and AID-BE3 edit Cs following target Gs more efficiently than BE3. FIG. 140A shows protospacer and PAM sequences of genomic loci studied, with target Cs edited by BE3, CDA1-BE3, and AID-BE3 shown in red, and target Cs (following Gs) edited by CDA1-BE3 and AID-BE3 only shown in purple. FIG. 140B shows HEK293T cells treated with BE3, CDA1-BE3, AID-BE3, or APOBEC3G-BE3 as described in the Materials and Methods of Example 17. C-to-T base editing efficiencies are shown. FIG. 140C shows individual DNA sequencing reads from HEK293T cells that were treated with BE3, CDA1-BE3, or AID-BE3 targeting the HEK2 locus and binned according to the sequence of the protospacer and analyzed, revealing that >85% of sequencing reads that have clean C to Tedits by CDA1-BE3 and AID-BE3 have both Cs edited to T (FIG. 140C).

[0184] FIGS. 141A to 141C show uneven editing in sites with multiple editable Cs results in lower product purity. FIG. 141A shows protospacers and PAM sequences of genomic loci studied, with the target Cs in FIG. 141C shown in purple and red, and target Cs in FIG. 141B shown in red. FIGS. 141B and 141C show HEK293T cells treated with BE3 as described in the Materials and Methods of Example 17. The product distribution among edited DNA sequencing reads (reads in which the target C is mutated) is shown. C to non-T editing is more frequent when editing efficiencies are unequal for two Cs within the same locus. Values and error bars reflect the mean±S.D. of three independent biological replicates performed on different days.

[0185] FIGS. 142A to 142D show base editing of multiple Cs results in higher base editing product purity. FIG. 142A shows protospacers and PAM sequences of genomic loci studied, with the target Cs that are investigated in FIG. 142B shown in red. FIG. 142B shows HEK293T cells treated with BE3 or BE3B (which lacks UGI) as described in the Materials and Methods of Example 17. The product distribution among edited DNA sequencing reads (reads in which the target C is mutated) is shown. FIG. 142C shows the HTS reads from HEK293T cells that were treated with BE3 or BE3B (which lacks UGI) targeting the HEK2 locus were binned according to the identity of the primary target C at position 6. The resulting reads were then analyzed for the identity of the base at the secondary target C at position 4. C₆ is more likely to be incorrectly edited to a non-T when there is only a single editing event in that read. FIG. 142D shows the distribution of edited reads with A, G, and T at C₅ in cells treated with BE3 or BE3B targeting the HEK4 locus (a site with only a single editable C), illustrating that single G:U mismatches are processed via UNG-initiated base excision repair to give a mixture of products. Values and error bars reflect the mean±S.D. of three independent biological replicates performed on different days.

[0186] FIG. 143 shows base editing of multiple Cs results in higher base editing product purity at the HEK3 and RNF2 loci. DNA sequencing reads from HEK293T cells treated with BE3 or BE3B (without UGI) targeting the HEK3 and RNF2 loci were separated according to the identity of the base at the primary target C position (in red). The four groups of sequencing reads were then interrogated for the identity of the base at the secondary target C position (in purple). For BE3, when the primary target C (in red) is incorrectly edited to G, the secondary target C is more likely to remain C. Conversely, when the primary target C (in red) is converted to T, the secondary target C is more likely to also be edited to a T in the same sequencing read. Values and error bars reflect the mean±S.D. of three independent biological replicates performed on different days.

[0187] FIGS. 144A to 144C show BE4 induces lower indel frequencies than BE3, and Target-AID exhibits similar product purities as CDA1-BE3. FIG. 144A shows HEK293T cells treated with BE3, BE4, or Target-AID as described in the Materials and Methods of Example 17. The frequency of indel formation (see Materials and Methods of Example 17) is shown. FIG. 144B shows HEK293T cells treated with CDA1-BE3 or Target-AID as described in the Materials and Methods of Example 17. The product distribution among edited DNA sequencing reads (reads in which the target C is mutated) is shown. FIG. 144C shows protospacers and PAM sequences of genomic loci studied, with the target Cs that are investigated in FIG. 144B shown in red. Values and error bars reflect the mean±S.D. of three independent biological replicates performed on different days.

[0188] FIGS. 145A to 145C show SaBE4 exhibits increased base editing yields and product purities compared to SaBE3. FIG. 145A shows HEK293T cells treated with SaBE3 and SaBE4 as described in the Materials and Methods of Example 17. The percentage of total DNA sequencing reads with Ts at the target positions indicated are shown. FIG. 145B shows protospacers and PAM sequences of genomic loci studied, with the target Cs in FIG. 145A shown in purple and red, with target Cs that are investigated in FIG. 145C shown in red. FIG. 145C shows the product distribution among edited DNA sequencing reads (reads in which the target C is mutated). Values and error bars reflect the mean±S.D. of three independent biological replicates performed on different days.

[0189] FIG. 146 shows base editing outcomes from treatment with BE3, CDA1-BE3, AID-BE3, or APOBEC3G-BE3 at the EMX1 locus. The sequence of the protospacer is shown at the top, with the PAM and the target bases in red with a subscripted number indicating their positions within the protospacer. Underneath the sequence are the percentages of total sequencing reads with the corresponding base. Cells were treated as described in the Materials and Methods of Example 17. Values shown are from one representative experiment.

[0190] FIG. 147 shows base editing outcomes from treatment with BE3, CDA1-BE3, AID-BE3, or APOBEC3G-BE3 at the FANCF locus. The sequence of the protospacer is shown at the top, with the PAM and the target bases in red with a subscripted number indicating their positions within the protospacer. Underneath the sequence are the percentages of total sequencing reads with the corresponding base. Cells were treated as described in the Materials and Methods of Example 17. Values shown are from one representative experiment.

[0191] FIG. 148 shows base editing outcomes from treatment with BE3, CDA1-BE3, AID-BE3, or APOBEC3G-BE3 at the HEK2 locus. The sequence of the protospacer is shown at the top, with the PAM and the target bases in red with a subscripted number indicating their positions within the protospacer. Underneath the sequence are the percentages of total sequencing reads with the corresponding base. Cells were treated as described in the Materials and Methods of Example 17. Values shown are from one representative experiment.

[0192] FIG. 149 shows base editing outcomes from treatment with BE3, CDA1-BE3, AID-BE3, or APOBEC3G-BE3 at the HEK3 locus. The sequence of the protospacer is shown at the top, with the PAM and the target bases in red with a subscripted number indicating their positions within the protospacer. Underneath the sequence are the percentages of total sequencing reads with the corresponding base. Cells were treated as described in the Materials and Methods of Example 17. Values shown are from one representative experiment.

[0193] FIG. 150 shows base editing outcomes from treatment with BE3, CDA1-BE3, AID-BE3, or APOBEC3G-BE3 at the HEK4 locus. The sequence of the protospacer is shown at the top, with the PAM and the target bases in red with a subscripted number indicating their positions within the protospacer. Underneath the sequence are the percentages of total sequencing reads with the corresponding base. Cells were treated as described in the Materials and Methods of Example 17. Values shown are from one representative experiment.

[0194] FIG. 151 shows base editing outcomes from treatment with BE3, CDA1-BE3, AID-BE3, or APOBEC3G-BE3 at the RNF2 locus. The sequence of the protospacer is shown at the top, with the PAM and the target bases in red with a subscripted number indicating their positions within the protospacer. Underneath the sequence are the percentages of total sequencing reads with the corresponding base. Cells were treated as described in the Materials and Methods of Example 17. Values shown are from one representative experiment.

[0195] FIG. 152 shows a schematic of LBCpf1 fusion constructs. Construct 10 has a domain arrangement of [Apobec]-[LbCpf1]-[UGI]-[UGI]; construct 11 has a domain arrangement of [Apobec]-[LbCpf1]-[UGI]; construct 12 has a domain arrangement of [UGI]-[Apobec]-[LbCpf1]; construct 13 has a domain arrangement of [Apobec]-[UGI]-[LbCpf1]; construct 14 has a domain arrangement of [LbCpf1]-[UGI]-[Apobec]; construct 15 has a domain arrangement of [LbCpf1]-[Apobec]-[UGI]. For each construct three different LbCpf1 proteins were used (D/N/A, which refers to nuclease dead LbCpf1 (D); LbCpf1 nickase (N) and nuclease active LbCpf1 (A)).

[0196] FIG. 153 shows the percentage of C to T editing of six C residues in the EMX target TTTGTAC₃TTTGTC₉C₁₀TC12C₁₃GGTTC₁₈TG (SEQ ID NO: 738) using a guide of 19 nucleotides in length, i.e., EMX19: TACTTTGTCCTCCGGTTCT (SEQ ID NO: 744). Editing was tested for several of the constructs shown in FIG. 152.

[0197] FIG. 154 shows the percentage of C to T editing of six C residues in the EMX target TTTGTAC₃TTTGTC₉C₁₀TC12C₁₃GGTTC₁₈TG (SEQ ID NO: 738) using a guide of 18 nucleotides in length, i.e., EMX18: TACTTTGTCCTCCGGTTC (SEQ ID NO: 745). Editing was tested for several of the constructs shown in FIG. 152.

[0198] FIG. 155 shows the percentage of C to T editing of six C residues in the EMX target TTTGTAC₃TTTGTC₉C₁₀TC12C₁₃GGTTC₁₈TG (SEQ ID NO: 738) using a guide of 17 nucleotides in length, i.e., EMX17: TACTTTGTCCTCCGGTT (SEQ ID NO: 746). Editing was tested for several of the constructs shown in FIG. 152.

[0199] FIG. 156 shows the percentage of C to T editing of eight C residues in the HEK2 target TTTCC₁AGC₄C₅C₆GC₈TGGC₁₂C₁₃C₁₄TGTAAA (SEQ ID NO: 739) using a guide of 23 nucleotides in length, i.e., Hek2_23: CAGCCCGCTGGCCCTGTAAAGGA (SEQ ID NO: 747). Editing was tested for several of the constructs shown in FIG. 152.

[0200] FIG. 157 shows the percentage of C to T editing of eight C residues in the HEK2 target TTTCC₁AGC₄C₅C₆GC₈TGGC₁₂C₁₃C₁₄TGTAAA (SEQ ID NO: 739) using a guide of 20 nucleotides in length, i.e., Hek2_20: CAGCCCGCTGGCCCTGTAAA (SEQ ID NO: 748). Editing was tested for several of the constructs shown in FIG. 152.

[0201] FIG. 158 shows the percentage of C to T editing of eight C residues in the HEK2 target TTTCC₁AGC₄C₅C₆GC₈TGGC₁₂C₁₃C₁₄TGTAAA (SEQ ID NO: 739) using a guide of 19 nucleotides in length, i.e., Hek2_19: CAGCCCGCTGGCCCTGTAA (SEQ ID NO: 749). Editing was tested for several of the constructs shown in FIG. 152.

[0202] FIG. 159 shows the percentage of C to T editing of eight C residues in the HEK2 target TTTCC₁AGC₄C₅C₆GC₈TGGC₁₂C₁₃C₁₄TGTAAA (SEQ ID NO: 739) using a guide of 18 nucleotides in length, i.e., Hek2_18: CAGCCCGCTGGCCCTGTA (SEQ ID NO: 750). Editing was tested for several of the constructs shown in FIG. 152.

[0203] FIG. 160 shows the editing percentage values (after adjustment based on indel count), and the percentage of indels for the experiments depicted in FIG. 153.

[0204] FIG. 161 shows the editing percentage values (after adjustment based on indel count), and the percentage of indels for the experiments depicted in FIG. 154.

[0205] FIG. 162 shows the editing percentage values (after adjustment based on indel count), and the percentage of indels for the experiments depicted in FIG. 155.

[0206] FIG. 163 shows the editing percentage values (after adjustment based on indel count), and the percentage of indels for the experiments depicted in FIG. 156.

[0207] FIG. 164 shows the editing percentage values (after adjustment based on indel count), and the percentage of indels for the experiments depicted in FIG. 157.

[0208] FIG. 165 shows the editing percentage values (after adjustment based on indel count), and the percentage of indels for the experiments depicted in FIG. 158.

[0209] FIG. 166 shows the editing percentage values (after adjustment based on indel count), and the percentage of indels for the experiments depicted in FIG. 159.

### DEFINITIONS

[0210] As used herein and in the claims, the singular forms “a,” “an,” and “the” include the singular and the plural reference unless the context clearly indicates otherwise. Thus, for example, a reference to “an agent” includes a single agent and a plurality of such agents.

[0211] The term “nucleic acid programmable DNA binding protein” or “napDNAbp” refers to a protein that associates with a nucleic acid (e.g., DNA or RNA), such as a guide nucleic acid (e.g., gRNA), that guides the napDNAbp to a specific nucleic acid sequence, for example, by hybridinzing to the target nucleic acid sequence. For example, a Cas9 protein can associate with a guide RNA that guides the Cas9 protein to a specific DNA sequence is has complementary to the guide RNA. In some embodiments, the napDNAbp is a class 2 microbial CRISPR-Cas effector. In some embodiments, the napDNAbp is a Cas9 domain, for example, a nuclease active Cas9, a Cas9 nickase (nCas9), or a nuclease inactive Cas9 (dCas9). Examples of nucleic acid programmable DNA binding proteins include, without limitation, Cas9 (e.g., dCas9 and nCas9), CasX, CasY, Cpf1, C2c1, C2c2, C2C3, and Argonaute. It should be appreciated, however, that nucleic acid programmable DNA binding proteins also include nucleic acid programmable proteins that bind RNA. For example, the napDNAbp may be associated with a nucleic acid that guides the napDNAbp to an RNA. Other nucleic acid programmable DNA binding proteins are also within the scope of this disclosure, though they may not be specifically described in this disclosure.

[0212] In some embodiments, the napDNAby is an “RNA-programmable nuclease” or “RNA-guided nuclease.” The terms are used interchangeably herein and refer to a nuclease that forms a complex with (e.g., binds or associates with) one or more RNA(s) that is not a target for cleavage. In some embodiments, an RNA-programmable nuclease, when in a complex with an RNA, may be referred to as a nuclease:RNA complex. Typically, the bound RNA(s) is referred to as a guide RNA (gRNA). gRNAs can exist as a complex of two or more RNAs, or as a single RNA molecule. gRNAs that exist as a single RNA molecule may be referred to as single-guide RNAs (sgRNAs), though “gRNA” is also used to refer to guide RNAs that exist as either single molecules or as a complex of two or more molecules. Typically, gRNAs that exist as a single RNA species comprise two domains: (1) a domain that shares homology to a target nucleic acid (i.e., directs binding of a Cas9 complex to the target); and (2) a domain that binds a Cas9 protein. In some embodiments, domain (2) corresponds to a sequence known as a tracrRNA and comprises a stem-loop structure. In some embodiments, domain (2) is identical or homologous to a tracrRNA as provided in Jinek et al., Science 337:816-821 (2012), the entire contents of which is incorporated herein by reference. Other examples of gRNAs (e.g., those including domain 2) can be found in U.S. Provisional patent application, U.S. Ser. No. 61/874,682, filed Sep. 6, 2013, entitled “Switchable Cas9 Nucleases And Uses Thereof,” and U.S. Provisional patent application, U.S. Ser. No. 61/874,746, filed Sep. 6, 2013, entitled “Delivery System For Functional Nucleases,” the entire contents of each are hereby incorporated by reference in their entirety. In some embodiments, a gRNA comprises two or more of domains (1) and (2), and may be referred to as an “extended gRNA.” For example, an extended gRNA will bind two or more Cas9 proteins and bind a target nucleic acid at two or more distinct regions, as described herein. The gRNA comprises a nucleotide sequence that complements a target site, which mediates binding of the nuclease/RNA complex to said target site, providing the sequence specificity of the nuclease:RNA complex. In some embodiments, the RNA-programmable nuclease is the (CRISPR-associated system) Cas9 endonuclease, for example, Cas9 (Csn1) from Streptococcus pyogenes (see, e.g., “Complete genome sequence of an M1 strain of Streptococcus pyogenes.” Ferretti J. J., McShan W. M., Ajdic D. J., Savic D. J., Savic G., Lyon K., Primeaux C., Sezate S., Suvorov A. N., Kenton S., Lai H. S., Lin S. P., Qian Y., Jia H. G., Najar F. Z., Ren Q., Zhu H., Song L., White J., Yuan X., Clifton S. W., Roe B. A., McLaughlin R. E., Proc. Natl. Acad. Sci. U.S.A. 98:4658-4663 (2001); “CRISPR RNA maturation by trans-encoded small RNA and host factor RNase III.” Deltcheva E., Chylinski K., Sharma C. M., Gonzales K., Chao Y., Pirzada Z. A., Eckert M. R., Vogel J., Charpentier E., Nature 471:602-607 (2011); and “A programmable dual-RNA-guided DNA endonuclease in adaptive bacterial immunity.” Jinek M., Chylinski K., Fonfara I., Hauer M., Doudna J. A., Charpentier E. Science 337:816-821 (2012), the entire contents of each of which are incorporated herein by reference.

[0213] In some embodiments, any of the sgRNAs provided herein comprise a sequence, e.g., a sgRNA backbone sequence that binds to a napDNAbp. For example sgRNAs have been described in Jinek M, Chylinski K, Fonfara I, Hauer M, Doudna J A, and Charpentier E (2012) A programmable dual-RNA-guided DNA endonuclease in adaptive bacterial immunity. Science, 337, 816-812; Mali P, Esvelt K M, Church G M (2013) Cas9 as a versatile tool for engineering biology. Nature Methods, 10, 957-963; Li J F, Norville J E, Aach J, McCromack M, Zhang D, Bush J, Church G M, and Sheen J (2013) Multiplex and homologous recombination-mediated genome editing in Arabidopsis and Nicotiana benthamiana using guide RNA and Cas9. Nature Biotech, 31, 688-691; Hwang W Y, Fu Y, Reyon D, Maeder M L, Tsai S Q, Sander J D, Peterson R T, Yeh J R J, Joung J K (2013) Efficient in vivo genome editing using RNA-guided nucleases. Nat Biotechnol, 31, 227-229; Cong L, Ran F A, Cox D, Lin S, Barretto R, Habib N, Hsu P D, Wu X, Jiang W, Marraffini L A, Zhang F (2013) Multiplex genome engineering using CRIPSR/Cas systems. Science, 339, 819-823; Cho S W, Kim S, Kim J M, Kim J S (2013) Targeted genome engineering in human cells with the Cas9 RNA-guided endonuclease. Nat Biotechnol, 31, 230-232; Jinek M J, East A, Cheng A, Lin S, Ma E, Doudna J (2013) RNA-programmed genome editing in human cells. eLIFE, 2:e00471; DiCarlo J E, Norville J E, Mali P, Rios, Aach J, Church G M (2013) Genome engineering in Saccharomyces cerevisiae using CRISPR-Cas systems. Nucl Acids Res, 41, 4336-4343; Briner A E, Donohoue P D, Gomaa A A, Selle K, Slorach E M, Nye C H, Haurwitz R E, Beisel C L, May A P, and Barrangou R (2014) Guide RNA functional modules direct Cas9 activity and orthogonality. Mol Cell, 56, 333-339; the contents of each of which are incorporated herein by reference. In some embodiments, any of the gRNAs (e.g., sgRNAs) provided herin comprise the nucleic acid sequence of GTAATTTCTACTAAGTGTAGAT (SEQ ID NO: 741), wherein each of the Ts of SEQ ID NO: 741 are uracil (U), i.e., GUAAUUUCUACUAAGUGUAGAU, or the sequence GUUUUAGAGCUAGAAAUAGCAAGUUAAAAUAAGGCUAGUCCGUUAUCAACUUG AAAAAGUGGCACCGAGUCGGUGCUUUUU-3′ (SEQ ID NO: 618).

[0214] Because RNA-programmable nucleases (e.g., Cas9) use RNA:DNA hybridization to target DNA cleavage sites, these proteins are able to target, in principle, any sequence specified by the guide RNA. Methods of using RNA-programmable nucleases, such as Cas9, for site-specific cleavage (e.g., to modify a genome) are known in the art (see e.g., Cong, L. et al., Multiplex genome engineering using CRISPR/Cas systems. Science 339, 819-823 (2013); Mali, P. et al., RNA-guided human genome engineering via Cas9. Science 339, 823-826 (2013); Hwang, W. Y. et al., Efficient genome editing in zebrafish using a CRISPR-Cas system. Nature biotechnology 31, 227-229 (2013); Jinek, M. et al. RNA-programmed genome editing in human cells. eLife 2, e00471 (2013); Dicarlo, J. E. et al., Genome engineering in Saccharomyces cerevisiae using CRISPR-Cas systems. Nucleic Acids Research (2013); Jiang, W. et al., RNA-guided editing of bacterial genomes using CRISPR-Cas systems. Nature Biotechnology 31, 233-239 (2013); the entire contents of each of which are incorporated herein by reference).

[0215] The term “Cas9” or “Cas9 nuclease” refers to an RNA-guided nuclease comprising a Cas9 protein, or a fragment thereof (e.g., a protein comprising an active, inactive, or partially active DNA cleavage domain of Cas9, and/or the gRNA binding domain of Cas9). A Cas9 nuclease is also referred to sometimes as a casn1 nuclease or a CRISPR (clustered regularly interspaced short palindromic repeat)-associated nuclease. CRISPR is an adaptive immune system that provides protection against mobile genetic elements (viruses, transposable elements and conjugative plasmids). CRISPR clusters contain spacers, sequences complementary to antecedent mobile elements, and target invading nucleic acids. CRISPR clusters are transcribed and processed into CRISPR RNA (crRNA). In type II CRISPR systems correct processing of pre-crRNA requires a trans-encoded small RNA (tracrRNA), endogenous ribonuclease 3 (mc) and a Cas9 protein. The tracrRNA serves as a guide for ribonuclease 3-aided processing of pre-crRNA. Subsequently, Cas9/crRNA/tracrRNA endonucleolytically cleaves linear or circular dsDNA target complementary to the spacer. The target strand not complementary to crRNA is first cut endonucleolytically, then trimmed 3′-5′ exonucleolytically. In nature, DNA-binding and cleavage typically requires protein and both RNAs. However, single guide RNAs (“sgRNA”, or simply “gNRA”) can be engineered so as to incorporate aspects of both the crRNA and tracrRNA into a single RNA species. See, e.g., Jinek M., Chylinski K., Fonfara I., Hauer M., Doudna J. A., Charpentier E. Science 337:816-821(2012), the entire contents of which is hereby incorporated by reference. Cas9 recognizes a short motif in the CRISPR repeat sequences (the PAM or protospacer adjacent motif) to help distinguish self versus non-self. Cas9 nuclease sequences and structures are well known to those of skill in the art (see, e.g., “Complete genome sequence of an M1 strain of Streptococcus pyogenes.” Ferretti et al., J. J., McShan W. M., Ajdic D. J., Savic D. J., Savic G., Lyon K., Primeaux C., Sezate S., Suvorov A. N., Kenton S., Lai H. S., Lin S. P., Qian Y., Jia H. G., Najar F. Z., Ren Q., Zhu H., Song L., White J., Yuan X., Clifton S. W., Roe B. A., McLaughlin R. E., Proc. Natl. Acad. Sci. U.S.A. 98:4658-4663(2001); “CRISPR RNA maturation by trans-encoded small RNA and host factor RNase III.” Deltcheva E., Chylinski K., Sharma C. M., Gonzales K., Chao Y., Pirzada Z. A., Eckert M. R., Vogel J., Charpentier E., Nature 471:602-607(2011); and “A programmable dual-RNA-guided DNA endonuclease in adaptive bacterial immunity.” Jinek M., Chylinski K., Fonfara I., Hauer M., Doudna J. A., Charpentier E. Science 337:816-821(2012), the entire contents of each of which are incorporated herein by reference). Cas9 orthologs have been described in various species, including, but not limited to, S. pyogenes and S. thermophilus. Additional suitable Cas9 nucleases and sequences will be apparent to those of skill in the art based on this disclosure, and such Cas9 nucleases and sequences include Cas9 sequences from the organisms and loci disclosed in Chylinski, Rhun, and Charpentier, “The tracrRNA and Cas9 families of type II CRISPR-Cas immunity systems” (2013) RNA Biology 10:5, 726-737; the entire contents of which are incorporated herein by reference. In some embodiments, a Cas9 nuclease has an inactive (e.g., an inactivated) DNA cleavage domain, that is, the Cas9 is a nickase.

[0216] A nuclease-inactivated Cas9 protein may interchangeably be referred to as a “dCas9” protein (for nuclease-“dead” Cas9). Methods for generating a Cas9 protein (or a fragment thereof) having an inactive DNA cleavage domain are known (See, e.g., Jinek et al., Science. 337:816-821(2012); Qi et al., “Repurposing CRISPR as an RNA-Guided Platform for Sequence-Specific Control of Gene Expression” (2013) Cell. 28; 152(5):1173-83, the entire contents of each of which are incorporated herein by reference). For example, the DNA cleavage domain of Cas9 is known to include two subdomains, the HNH nuclease subdomain and the RuvC1 subdomain. The HNH subdomain cleaves the strand complementary to the gRNA, whereas the RuvC1 subdomain cleaves the non-complementary strand. Mutations within these subdomains can silence the nuclease activity of Cas9. For example, the mutations D10A and H840A completely inactivate the nuclease activity of S. pyogenes Cas9 (Jinek et al., Science. 337:816-821(2012); Qi et al., Cell. 28; 152(5):1173-83 (2013)). In some embodiments, proteins comprising fragments of Cas9 are provided. For example, in some embodiments, a protein comprises one of two Cas9 domains: (1) the gRNA binding domain of Cas9; or (2) the DNA cleavage domain of Cas9. In some embodiments, proteins comprising Cas9 or fragments thereof are referred to as “Cas9 variants.” A Cas9 variant shares homology to Cas9, or a fragment thereof. For example a Cas9 variant is at least about 70% identical, at least about 80% identical, at least about 90% identical, at least about 95% identical, at least about 96% identical, at least about 97% identical, at least about 98% identical, at least about 99% identical, at least about 99.5% identical, or at least about 99.9% identical to wild type Cas9. In some embodiments, the Cas9 variant may have 1, 2, 3, 4, 5, 6, 7, 8, 9, 10, 11, 12, 13, 14, 15, 16, 17, 18, 19, 20, 21, 22, 21, 24, 25, 26, 27, 28, 29, 30, 31, 32, 33, 34, 35, 36, 37, 38, 39, 40, 41, 42, 43, 44, 45, 46, 47, 48, 49, 50 or more amino acid changes compared to wild type Cas9. In some embodiments, the Cas9 variant comprises a fragment of Cas9 (e.g., a gRNA binding domain or a DNA-cleavage domain), such that the fragment is at least about 70% identical, at least about 80% identical, at least about 90% identical, at least about 95% identical, at least about 96% identical, at least about 97% identical, at least about 98% identical, at least about 99% identical, at least about 99.5% identical, or at least about 99.9% identical to the corresponding fragment of wild type Cas9. In some embodiments, the fragment is is at least 30%, at least 35%, at least 40%, at least 45%, at least 50%, at least 55%, at least 60%, at least 65%, at least 70%, at least 75%, at least 80%, at least 85%, at least 90%, at least 95% identical, at least 96%, at least 97%, at least 98%, at least 99%, or at least 99.5% of the amino acid length of a corresponding wild type Cas9.

[0217] In some embodiments, the fragment is at least 100 amino acids in length. In some embodiments, the fragment is at least 100, 150, 200, 250, 300, 350, 400, 450, 500, 550, 600, 650, 700, 750, 800, 850, 900, 950, 1000, 1050, 1100, 1150, 1200, 1250, or at least 1300 amino acids in length. In some embodiments, wild type Cas9 corresponds to Cas9 from Streptococcus pyogenes (NCBI Reference Sequence: NC_017053.1, SEQ ID NO: 1 (nucleotide); SEQ ID NO: 2 (amino acid)).

(SEQ ID NO: 1)
ATGGATAAGAAATACTCAATAGGCTTAGATATCGGCACAAATAGCGTCGG
ATGGGCGGTGATCACTGATGATTATAAGGTTCCGTCTAAAAAGTTCAAGG
TTCTGGGAAATACAGACCGCCACAGTATCAAAAAAAATCTTATAGGGGCT
CTTTTATTTGGCAGTGGAGAGACAGCGGAAGCGACTCGTCTCAAACGGAC
AGCTCGTAGAAGGTATACACGTCGGAAGAATCGTATTTGTTATCTACAGG
AGATTTTTTCAAATGAGATGGCGAAAGTAGATGATAGTTTCTTTCATCGA
CTTGAAGAGTCTTTTTTGGTGGAAGAAGACAAGAAGCATGAACGTCATCC
TATTTTTGGAAATATAGTAGATGAAGTTGCTTATCATGAGAAATATCCAA
CTATCTATCATCTGCGAAAAAAATTGGCAGATTCTACTGATAAAGCGGAT
TTGCGCTTAATCTATTTGGCCTTAGCGCATATGATTAAGTTTCGTGGTCA
TTTTTTGATTGAGGGAGATTTAAATCCTGATAATAGTGATGTGGACAAAC
TATTTATCCAGTTGGTACAAATCTACAATCAATTATTTGAAGAAAACCCT
ATTAACGCAAGTAGAGTAGATGCTAAAGCGATTCTTTCTGCACGATTGAG
TAAATCAAGACGATTAGAAAATCTCATTGCTCAGCTCCCCGGTGAGAAGA
GAAATGGCTTGTTTGGGAATCTCATTGCTTTGTCATTGGGATTGACCCCT
AATTTTAAATCAAATTTTGATTTGGCAGAAGATGCTAAATTACAGCTTTC
AAAAGATACTTACGATGATGATTTAGATAATTTATTGGCGCAAATTGGAG
ATCAATATGCTGATTTGTTTTTGGCAGCTAAGAATTTATCAGATGCTATT
TTACTTTCAGATATCCTAAGAGTAAATAGTGAAATAACTAAGGCTCCCCT
ATCAGCTTCAATGATTAAGCGCTACGATGAACATCATCAAGACTTGACTC
TTTTAAAAGCTTTAGTTCGACAACAACTTCCAGAAAAGTATAAAGAAATC
TTTTTTGATCAATCAAAAAACGGATATGCAGGTTATATTGATGGGGGAGC
TAGCCAAGAAGAATTTTATAAATTTATCAAACCAATTTTAGAAAAAATGG
ATGGTACTGAGGAATTATTGGTGAAACTAAATCGTGAAGATTTGCTGCGC
AAGCAACGGACCTTTGACAACGGCTCTATTCCCCATCAAATTCACTTGGG
TGAGCTGCATGCTATTTTGAGAAGACAAGAAGACTTTTATCCATTTTTAA
AAGACAATCGTGAGAAGATTGAAAAAATCTTGACTTTTCGAATTCCTTAT
TATGTTGGTCCATTGGCGCGTGGCAATAGTCGTTTTGCATGGATGACTCG
GAAGTCTGAAGAAACAATTACCCCATGGAATTTTGAAGAAGTTGTCGATA
AAGGTGCTTCAGCTCAATCATTTATTGAACGCATGACAAACTTTGATAAA
AATCTTCCAAATGAAAAAGTACTACCAAAACATAGTTTGCTTTATGAGTA
TTTTACGGTTTATAACGAATTGACAAAGGTCAAATATGTTACTGAGGGAA
TGCGAAAACCAGCATTTCTTTCAGGTGAACAGAAGAAAGCCATTGTTGAT
TTACTCTTCAAAACAAATCGAAAAGTAACCGTTAAGCAATTAAAAGAAGA
TTATTTCAAAAAAATAGAATGTTTTGATAGTGTTGAAATTTCAGGAGTTG
AAGATAGATTTAATGCTTCATTAGGCGCCTACCATGATTTGCTAAAAATT
ATTAAAGATAAAGATTTTTTGGATAATGAAGAAAATGAAGATATCTTAGA
GGATATTGTTTTAACATTGACCTTATTTGAAGATAGGGGGATGATTGAGG
AAAGACTTAAAACATATGCTCACCTCTTTGATGATAAGGTGATGAAACAG
CTTAAACGTCGCCGTTATACTGGTTGGGGACGTTTGTCTCGAAAATTGAT
TAATGGTATTAGGGATAAGCAATCTGGCAAAACAATATTAGATTTTTTGA
AATCAGATGGTTTTGCCAATCGCAATTTTATGCAGCTGATCCATGATGAT
AGTTTGACATTTAAAGAAGATATTCAAAAAGCACAGGTGTCTGGACAAGG
CCATAGTTTACATGAACAGATTGCTAACTTAGCTGGCAGTCCTGCTATTA
AAAAAGGTATTTTACAGACTGTAAAAATTGTTGATGAACTGGTCAAAGTA
ATGGGGCATAAGCCAGAAAATATCGTTATTGAAATGGCACGTGAAAATCA
GACAACTCAAAAGGGCCAGAAAAATTCGCGAGAGCGTATGAAACGAATCG
AAGAAGGTATCAAAGAATTAGGAAGTCAGATTCTTAAAGAGCATCCTGTT
GAAAATACTCAATTGCAAAATGAAAAGCTCTATCTCTATTATCTACAAAA
TGGAAGAGACATGTATGTGGACCAAGAATTAGATATTAATCGTTTAAGTG
ATTATGATGTCGATCACATTGTTCCACAAAGTTTCATTAAAGACGATTCA
ATAGACAATAAGGTACTAACGCGTTCTGATAAAAATCGTGGTAAATCGGA
TAACGTTCCAAGTGAAGAAGTAGTCAAAAAGATGAAAAACTATTGGAGAC
AACTTCTAAACGCCAAGTTAATCACTCAACGTAAGTTTGATAATTTAACG
AAAGCTGAACGTGGAGGTTTGAGTGAACTTGATAAAGCTGGTTTTATCAA
ACGCCAATTGGTTGAAACTCGCCAAATCACTAAGCATGTGGCACAAATTT
TGGATAGTCGCATGAATACTAAATACGATGAAAATGATAAACTTATTCGA
GAGGTTAAAGTGATTACCTTAAAATCTAAATTAGTTTCTGACTTCCGAAA
AGATTTCCAATTCTATAAAGTACGTGAGATTAACAATTACCATCATGCCC
ATGATGCGTATCTAAATGCCGTCGTTGGAACTGCTTTGATTAAGAAATAT
CCAAAACTTGAATCGGAGTTTGTCTATGGTGATTATAAAGTTTATGATGT
TCGTAAAATGATTGCTAAGTCTGAGCAAGAAATAGGCAAAGCAACCGCAA
AATATTTCTTTTACTCTAATATCATGAACTTCTTCAAAACAGAAATTACA
CTTGCAAATGGAGAGATTCGCAAACGCCCTCTAATCGAAACTAATGGGGA
AACTGGAGAAATTGTCTGGGATAAAGGGCGAGATTTTGCCACAGTGCGCA
AAGTATTGTCCATGCCCCAAGTCAATATTGTCAAGAAAACAGAAGTACAG
ACAGGCGGATTCTCCAAGGAGTCAATTTTACCAAAAAGAAATTCGGACAA
GCTTATTGCTCGTAAAAAAGACTGGGATCCAAAAAAATATGGTGGTTTTG
ATAGTCCAACGGTAGCTTATTCAGTCCTAGTGGTTGCTAAGGTGGAAAAA
GGGAAATCGAAGAAGTTAAAATCCGTTAAAGAGTTACTAGGGATCACAAT
TATGGAAAGAAGTTCCTTTGAAAAAAATCCGATTGACTTTTTAGAAGCTA
AAGGATATAAGGAAGTTAAAAAAGACTTAATCATTAAACTACCTAAATAT
AGTCTTTTTGAGTTAGAAAACGGTCGTAAACGGATGCTGGCTAGTGCCGG
AGAATTACAAAAAGGAAATGAGCTGGCTCTGCCAAGCAAATATGTGAATT
TTTTATATTTAGCTAGTCATTATGAAAAGTTGAAGGGTAGTCCAGAAGAT
AACGAACAAAAACAATTGTTTGTGGAGCAGCATAAGCATTATTTAGATGA
GATTATTGAGCAAATCAGTGAATTTTCTAAGCGTGTTATTTTAGCAGATG
CCAATTTAGATAAAGTTCTTAGTGCATATAACAAACATAGAGACAAACCA
ATACGTGAACAAGCAGAAAATATTATTCATTTATTTACGTTGACGAATCT
TGGAGCTCCCGCTGCTTTTAAATATTTTGATACAACAATTGATCGTAAAC
GATATACGTCTACAAAAGAAGTTTTAGATGCCACTCTTATCCATCAATCC
ATCACTGGTCTTTATGAAACACGCATTGATTTGAGTCAGCTAGGAGGTGA
CTGA
(SEQ ID NO: 2)
MDKKYSIGLDIGTNSVGWAVITDDYKVPSKKFKVLGNTDRHSIKKNLIGA
LLFGSGETAEATRLKRTARRRYTRRKNRICYLQEIFSNEMAKVDDSFFHR
LEESFLVEEDKKHERHPIFGNIVDEVAYHEKYPTIYHLRKKLADSTDKAD
LRLIYLALAHMIKFRGHFLIEGDLNPDNSDVDKLFIQLVQIYNQLFEENP
INASRVDAKAILSARLSKSRRLENLIAQLPGEKRNGLFGNLIALSLGLTP
NFKSNFDLAEDAKLQLSKDTYDDDLDNLLAQIGDQYADLFLAAKNLSDAI
LLSDILRVNSEITKAPLSASMIKRYDEHHQDLTLLKALVRQQLPEKYKEI
FFDQSKNGYAGYIDGGASQEEFYKFIKPILEKMDGTEELLVKLNREDLLR
KQRTFDNGSIPHQIHLGELHAILRRQEDFYPFLKDNREKIEKILTFRIPY
YVGPLARGNSRFAWMTRKSEETITPWNFEEVVDKGASAQSFIERMTNFDK
NLPNEKVLPKHSLLYEYFTVYNELTKVKYVTEGMRKPAFLSGEQKKAIVD
LLFKTNRKVTVKQLKEDYFKKIECFDSVEISGVEDRFNASLGAYHDLLKI
IKDKDFLDNEENEDILEDIVLTLTLFEDRGMIEERLKTYAHLFDDKVMKQ
LKRRRYTGWGRLSRKLINGIRDKQSGKTILDFLKSDGFANRNFMQLIHDD
SLTFKEDIQKAQVSGQGHSLHEQIANLAGSPAIKKGILQTVKIVDELVKV
MGHKPENIVIEMARENQTTQKGQKNSRERMKRIEEGIKELGSQILKEHPV
ENTQLQNEKLYLYYLQNGRDMYVDQELDINRLSDYDVDHIVPQSFIKDDS
IDNKVLTRSDKNRGKSDNVPSEEVVKKMKNYWRQLLNAKLITQRKFDNLT
KAERGGLSELDKAGFIKRQLVETRQITKHVAQILDSRMNTKYDENDKLIR
EVKVITLKSKLVSDFRKDFQFYKVREINNYHHAHDAYLNAVVGTALIKKY
PKLESEFVYGDYKVYDVRKMIAKSEQEIGKATAKYFFYSNIMNFFKTEIT
LANGEIRKRPLIETNGETGEIVWDKGRDFATVRKVLSMPQVNIVKKTEVQ
TGGFSKESILPKRNSDKLIARKKDWDPKKYGGFDSPTVAYSVLVVAKVEK
GKSKKLKSVKELLGITIMERSSFEKNPIDFLEAKGYKEVKKDLIIKLPKY
SLFELENGRKRMLASAGELQKGNELALPSKYVNFLYLASHYEKLKGSPED
NEQKQLFVEQHKHYLDEIIEQISEFSKRVILADANLDKVLSAYNKHRDKP
IREQAENIIHLFTLTNLGAPAAFKYFDTTIDRKRYTSTKEVLDATLIHQS
ITGLYETRIDLSQLGGD
(single underline: HNH domain; double underline:
RuvC domain)

[0218] In some embodiments, wild type Cas9 corresponds to, or comprises SEQ ID NO:3 (nucleotide) and/or SEQ ID NO: 4 (amino acid):

(SEQ ID NO: 3)
ATGGATAAAAAGTATTCTATTGGTTTAGACATCGGCACTAATTCCGTTGG
ATGGGCTGTCATAACCGATGAATACAAAGTACCTTCAAAGAAATTTAAGG
TGTTGGGGAACACAGACCGTCATTCGATTAAAAAGAATCTTATCGGTGCC
CTCCTATTCGATAGTGGCGAAACGGCAGAGGCGACTCGCCTGAAACGAAC
CGCTCGGAGAAGGTATACACGTCGCAAGAACCGAATATGTTACTTACAAG
AAATTTTTAGCAATGAGATGGCCAAAGTTGACGATTCTTTCTTTCACCGT
TTGGAAGAGTCCTTCCTTGTCGAAGAGGACAAGAAACATGAACGGCACCC
CATCTTTGGAAACATAGTAGATGAGGTGGCATATCATGAAAAGTACCCAA
CGATTTATCACCTCAGAAAAAAGCTAGTTGACTCAACTGATAAAGCGGAC
CTGAGGTTAATCTACTTGGCTCTTGCCCATATGATAAAGTTCCGTGGGCA
CTTTCTCATTGAGGGTGATCTAAATCCGGACAACTCGGATGTCGACAAAC
TGTTCATCCAGTTAGTACAAACCTATAATCAGTTGTTTGAAGAGAACCCT
ATAAATGCAAGTGGCGTGGATGCGAAGGCTATTCTTAGCGCCCGCCTCTC
TAAATCCCGACGGCTAGAAAACCTGATCGCACAATTACCCGGAGAGAAGA
AAAATGGGTTGTTCGGTAACCTTATAGCGCTCTCACTAGGCCTGACACCA
AATTTTAAGTCGAACTTCGACTTAGCTGAAGATGCCAAATTGCAGCTTAG
TAAGGACACGTACGATGACGATCTCGACAATCTACTGGCACAAATTGGAG
ATCAGTATGCGGACTTATTTTTGGCTGCCAAAAACCTTAGCGATGCAATC
CTCCTATCTGACATACTGAGAGTTAATACTGAGATTACCAAGGCGCCGTT
ATCCGCTTCAATGATCAAAAGGTACGATGAACATCACCAAGACTTGACAC
TTCTCAAGGCCCTAGTCCGTCAGCAACTGCCTGAGAAATATAAGGAAATA
TTCTTTGATCAGTCGAAAAACGGGTACGCAGGTTATATTGACGGCGGAGC
GAGTCAAGAGGAATTCTACAAGTTTATCAAACCCATATTAGAGAAGATGG
ATGGGACGGAAGAGTTGCTTGTAAAACTCAATCGCGAAGATCTACTGCGA
AAGCAGCGGACTTTCGACAACGGTAGCATTCCACATCAAATCCACTTAGG
CGAATTGCATGCTATACTTAGAAGGCAGGAGGATTTTTATCCGTTCCTCA
AAGACAATCGTGAAAAGATTGAGAAAATCCTAACCTTTCGCATACCTTAC
TATGTGGGACCCCTGGCCCGAGGGAACTCTCGGTTCGCATGGATGACAAG
AAAGTCCGAAGAAACGATTACTCCATGGAATTTTGAGGAAGTTGTCGATA
AAGGTGCGTCAGCTCAATCGTTCATCGAGAGGATGACCAACTTTGACAAG
AATTTACCGAACGAAAAAGTATTGCCTAAGCACAGTTTACTTTACGAGTA
TTTCACAGTGTACAATGAACTCACGAAAGTTAAGTATGTCACTGAGGGCA
TGCGTAAACCCGCCTTTCTAAGCGGAGAACAGAAGAAAGCAATAGTAGAT
CTGTTATTCAAGACCAACCGCAAAGTGACAGTTAAGCAATTGAAAGAGGA
CTACTTTAAGAAAATTGAATGCTTCGATTCTGTCGAGATCTCCGGGGTAG
AAGATCGATTTAATGCGTCACTTGGTACGTATCATGACCTCCTAAAGATA
ATTAAAGATAAGGACTTCCTGGATAACGAAGAGAATGAAGATATCTTAGA
AGATATAGTGTTGACTCTTACCCTCTTTGAAGATCGGGAAATGATTGAGG
AAAGACTAAAAACATACGCTCACCTGTTCGACGATAAGGTTATGAAACAG
TTAAAGAGGCGTCGCTATACGGGCTGGGGACGATTGTCGCGGAAACTTAT
CAACGGGATAAGAGACAAGCAAAGTGGTAAAACTATTCTCGATTTTCTAA
AGAGCGACGGCTTCGCCAATAGGAACTTTATGCAGCTGATCCATGATGAC
TCTTTAACCTTCAAAGAGGATATACAAAAGGCACAGGTTTCCGGACAAGG
GGACTCATTGCACGAACATATTGCGAATCTTGCTGGTTCGCCAGCCATCA
AAAAGGGCATACTCCAGACAGTCAAAGTAGTGGATGAGCTAGTTAAGGTC
ATGGGACGTCACAAACCGGAAAACATTGTAATCGAGATGGCACGCGAAAA
TCAAACGACTCAGAAGGGGCAAAAAAACAGTCGAGAGCGGATGAAGAGAA
TAGAAGAGGGTATTAAAGAACTGGGCAGCCAGATCTTAAAGGAGCATCCT
GTGGAAAATACCCAATTGCAGAACGAGAAACTTTACCTCTATTACCTACA
AAATGGAAGGGACATGTATGTTGATCAGGAACTGGACATAAACCGTTTAT
CTGATTACGACGTCGATCACATTGTACCCCAATCCTTTTTGAAGGACGAT
TCAATCGACAATAAAGTGCTTACACGCTCGGATAAGAACCGAGGGAAAAG
TGACAATGTTCCAAGCGAGGAAGTCGTAAAGAAAATGAAGAACTATTGGC
GGCAGCTCCTAAATGCGAAACTGATAACGCAAAGAAAGTTCGATAACTTA
ACTAAAGCTGAGAGGGGTGGCTTGTCTGAACTTGACAAGGCCGGATTTAT
TAAACGTCAGCTCGTGGAAACCCGCCAAATCACAAAGCATGTTGCACAGA
TACTAGATTCCCGAATGAATACGAAATACGACGAGAACGATAAGCTGATT
CGGGAAGTCAAAGTAATCACTTTAAAGTCAAAATTGGTGTCGGACTTCAG
AAAGGATTTTCAATTCTATAAAGTTAGGGAGATAAATAACTACCACCATG
CGCACGACGCTTATCTTAATGCCGTCGTAGGGACCGCACTCATTAAGAAA
TACCCGAAGCTAGAAAGTGAGTTTGTGTATGGTGATTACAAAGTTTATGA
CGTCCGTAAGATGATCGCGAAAAGCGAACAGGAGATAGGCAAGGCTACAG
CCAAATACTTCTTTTATTCTAACATTATGAATTTCTTTAAGACGGAAATC
ACTCTGGCAAACGGAGAGATACGCAAACGACCTTTAATTGAAACCAATGG
GGAGACAGGTGAAATCGTATGGGATAAGGGCCGGGACTTCGCGACGGTGA
GAAAAGTTTTGTCCATGCCCCAAGTCAACATAGTAAAGAAAACTGAGGTG
CAGACCGGAGGGTTTTCAAAGGAATCGATTCTTCCAAAAAGGAATAGTGA
TAAGCTCATCGCTCGTAAAAAGGACTGGGACCCGAAAAAGTACGGTGGCT
TCGATAGCCCTACAGTTGCCTATTCTGTCCTAGTAGTGGCAAAAGTTGAG
AAGGGAAAATCCAAGAAACTGAAGTCAGTCAAAGAATTATTGGGGATAAC
GATTATGGAGCGCTCGTCTTTTGAAAAGAACCCCATCGACTTCCTTGAGG
CGAAAGGTTACAAGGAAGTAAAAAAGGATCTCATAATTAAACTACCAAAG
TATAGTCTGTTTGAGTTAGAAAATGGCCGAAAACGGATGTTGGCTAGCGC
CGGAGAGCTTCAAAAGGGGAACGAACTCGCACTACCGTCTAAATACGTGA
ATTTCCTGTATTTAGCGTCCCATTACGAGAAGTTGAAAGGTTCACCTGAA
GATAACGAACAGAAGCAACTTTTTGTTGAGCAGCACAAACATTATCTCGA
CGAAATCATAGAGCAAATTTCGGAATTCAGTAAGAGAGTCATCCTAGCTG
ATGCCAATCTGGACAAAGTATTAAGCGCATACAACAAGCACAGGGATAAA
CCCATACGTGAGCAGGCGGAAAATATTATCCATTTGTTTACTCTTACCAA
CCTCGGCGCTCCAGCCGCATTCAAGTATTTTGACACAACGATAGATCGCA
AACGATACACTTCTACCAAGGAGGTGCTAGACGCGACACTGATTCACCAA
TCCATCACGGGATTATATGAAACTCGGATAGATTTGTCACAGCTTGGGGG
TGACGGATCCCCCAAGAAGAAGAGGAAAGTCTCGAGCGACTACAAAGACC
ATGACGGTGATTATAAAGATCATGACATCGATTACAAGGATGACGATGAC
AAGGCTGCAGGA
(SEQ ID NO: 4)
MDKKYSIGLAIGTNSVGWAVITDEYKVPSKKFKVLGNTDRHSIKKNLIGA
LLFDSGETAEATRLKRTARRRYTRRKNRICYLQEIFSNEMAKVDDSFFHR
LEESFLVEEDKKHERHPIFGNIVDEVAYHEKYPTIYHLRKKLVDSTDKAD
LRLIYLALAHMIKFRGHFLIEGDLNPDNSDVDKLFIQLVQTYNQLFEENP
INASGVDAKAILSARLSKSRRLENLIAQLPGEKKNGLFGNLIALSLGLTP
NFKSNFDLAEDAKLQLSKDTYDDDLDNLLAQIGDQYADLFLAAKNLSDAI
LLSDILRVNTEITKAPLSASMIKRYDEHHQDLTLLKALVRQQLPEKYKEI
FFDQSKNGYAGYIDGGASQEEFYKFIKPILEKMDGTEELLVKLNREDLLR
KQRTFDNGSIPHQIHLGELHAILRRQEDFYPFLKDNREKIEKILTFRIPY
YVGPLARGNSRFAWMTRKSEETITPWNFEEVVDKGASAQSFIERMTNFDK
NLPNEKVLPKHSLLYEYFTVYNELTKVKYVTEGMRKPAFLSGEQKKAIVD
LLFKTNRKVTVKQLKEDYFKKIECFDSVEISGVEDRFNASLGTYHDLLKI
IKDKDFLDNEENEDILEDIVLTLTLFEDREMIEERLKTYAHLFDDKVMKQ
LKRRRYTGWGRLSRKLINGIRDKQSGKTILDFLKSDGFANRNFMQLIHDD
SLTFKEDIQKAQVSGQGDSLHEHIANLAGSPAIKKGILQTVKVVDELVKV
MGRHKPENIVIEMARENQTTQKGQKNSRERMKRIEEGIKELGSQILKEHP
VENTQLQNEKLYLYYLQNGRDMYVDQELDINRLSDYDVDHIVPQSFLKDD
SIDNKVLTRSDKNRGKSDNVPSEEVVKKMKNYWRQLLNAKLITQRKFDNL
TKAERGGLSELDKAGFIKRQLVETRQITKHVAQILDSRMNTKYDENDKLI
REVKVITLKSKLVSDFRKDFQFYKVREINNYHHAHDAYLNAVVGTALIKK
YPKLESEFVYGDYKVYDVRKMIAKSEQEIGKATAKYFFYSNIMNFFKTEI
TLANGEIRKRPLIETNGETGEIVWDKGRDFATVRKVLSMPQVNIVKKTEV
QTGGFSKESILPKRNSDKLIARKKDWDPKKYGGFDSPTVAYSVLVVAKVE
KGKSKKLKSVKELLGITIMERSSFEKNPIDFLEAKGYKEVKKDLIIKLPK
YSLFELENGRKRMLASAGELQKGNELALPSKYVNFLYLASHYEKLKGSPE
DNEQKQLFVEQHKHYLDEIIEQISEFSKRVILADANLDKVLSAYNKHRDK
PIREQAENIIHLFTLTNLGAPAAFKYFDTTIDRKRYTSTKEVLDATLIHQ
SITGLYETRIDLSQLGGD
(single underline: HNH domain; double underline:
RuvC domain)

[0219] In some embodiments, wild type Cas9 corresponds to Cas9 from Streptococcus pyogenes (NCBI Reference Sequence: NC_002737.2, SEQ ID NO: 5 (nucleotide); and Uniport Reference Sequence: Q99ZW2, SEQ ID NO: 6 (amino acid).

(SEQ ID NO: 5)
ATGGATAAGAAATACTCAATAGGCTTAGATATCGGCACAAATAGCGTCGG
ATGGGCGGTGATCACTGATGAATATAAGGTTCCGTCTAAAAAGTTCAAGG
TTCTGGGAAATACAGACCGCCACAGTATCAAAAAAAATCTTATAGGGGCT
CTTTTATTTGACAGTGGAGAGACAGCGGAAGCGACTCGTCTCAAACGGAC
AGCTCGTAGAAGGTATACACGTCGGAAGAATCGTATTTGTTATCTACAGG
AGATTTTTTCAAATGAGATGGCGAAAGTAGATGATAGTTTCTTTCATCGA
CTTGAAGAGTCTTTTTTGGTGGAAGAAGACAAGAAGCATGAACGTCATCC
TATTTTTGGAAATATAGTAGATGAAGTTGCTTATCATGAGAAATATCCAA
CTATCTATCATCTGCGAAAAAAATTGGTAGATTCTACTGATAAAGCGGAT
TTGCGCTTAATCTATTTGGCCTTAGCGCATATGATTAAGTTTCGTGGTCA
TTTTTTGATTGAGGGAGATTTAAATCCTGATAATAGTGATGTGGACAAAC
TATTTATCCAGTTGGTACAAACCTACAATCAATTATTTGAAGAAAACCCT
ATTAACGCAAGTGGAGTAGATGCTAAAGCGATTCTTTCTGCACGATTGAG
TAAATCAAGACGATTAGAAAATCTCATTGCTCAGCTCCCCGGTGAGAAGA
AAAATGGCTTATTTGGGAATCTCATTGCTTTGTCATTGGGTTTGACCCCT
AATTTTAAATCAAATTTTGATTTGGCAGAAGATGCTAAATTACAGCTTTC
AAAAGATACTTACGATGATGATTTAGATAATTTATTGGCGCAAATTGGAG
ATCAATATGCTGATTTGTTTTTGGCAGCTAAGAATTTATCAGATGCTATT
TTACTTTCAGATATCCTAAGAGTAAATACTGAAATAACTAAGGCTCCCCT
ATCAGCTTCAATGATTAAACGCTACGATGAACATCATCAAGACTTGACTC
TTTTAAAAGCTTTAGTTCGACAACAACTTCCAGAAAAGTATAAAGAAATC
TTTTTTGATCAATCAAAAAACGGATATGCAGGTTATATTGATGGGGGAGC
TAGCCAAGAAGAATTTTATAAATTTATCAAACCAATTTTAGAAAAAATGG
ATGGTACTGAGGAATTATTGGTGAAACTAAATCGTGAAGATTTGCTGCGC
AAGCAACGGACCTTTGACAACGGCTCTATTCCCCATCAAATTCACTTGGG
TGAGCTGCATGCTATTTTGAGAAGACAAGAAGACTTTTATCCATTTTTAA
AAGACAATCGTGAGAAGATTGAAAAAATCTTGACTTTTCGAATTCCTTAT
TATGTTGGTCCATTGGCGCGTGGCAATAGTCGTTTTGCATGGATGACTCG
GAAGTCTGAAGAAACAATTACCCCATGGAATTTTGAAGAAGTTGTCGATA
AAGGTGCTTCAGCTCAATCATTTATTGAACGCATGACAAACTTTGATAAA
AATCTTCCAAATGAAAAAGTACTACCAAAACATAGTTTGCTTTATGAGTA
TTTTACGGTTTATAACGAATTGACAAAGGTCAAATATGTTACTGAAGGAA
TGCGAAAACCAGCATTTCTTTCAGGTGAACAGAAGAAAGCCATTGTTGAT
TTACTCTTCAAAACAAATCGAAAAGTAACCGTTAAGCAATTAAAAGAAGA
TTATTTCAAAAAAATAGAATGTTTTGATAGTGTTGAAATTTCAGGAGTTG
AAGATAGATTTAATGCTTCATTAGGTACCTACCATGATTTGCTAAAAATT
ATTAAAGATAAAGATTTTTTGGATAATGAAGAAAATGAAGATATCTTAGA
GGATATTGTTTTAACATTGACCTTATTTGAAGATAGGGAGATGATTGAGG
AAAGACTTAAAACATATGCTCACCTCTTTGATGATAAGGTGATGAAACAG
CTTAAACGTCGCCGTTATACTGGTTGGGGACGTTTGTCTCGAAAATTGAT
TAATGGTATTAGGGATAAGCAATCTGGCAAAACAATATTAGATTTTTTGA
AATCAGATGGTTTTGCCAATCGCAATTTTATGCAGCTGATCCATGATGAT
AGTTTGACATTTAAAGAAGACATTCAAAAAGCACAAGTGTCTGGACAAGG
CGATAGTTTACATGAACATATTGCAAATTTAGCTGGTAGCCCTGCTATTA
AAAAAGGTATTTTACAGACTGTAAAAGTTGTTGATGAATTGGTCAAAGTA
ATGGGGCGGCATAAGCCAGAAAATATCGTTATTGAAATGGCACGTGAAAA
TCAGACAACTCAAAAGGGCCAGAAAAATTCGCGAGAGCGTATGAAACGAA
TCGAAGAAGGTATCAAAGAATTAGGAAGTCAGATTCTTAAAGAGCATCCT
GTTGAAAATACTCAATTGCAAAATGAAAAGCTCTATCTCTATTATCTCCA
AAATGGAAGAGACATGTATGTGGACCAAGAATTAGATATTAATCGTTTAA
GTGATTATGATGTCGATCACATTGTTCCACAAAGTTTCCTTAAAGACGAT
TCAATAGACAATAAGGTCTTAACGCGTTCTGATAAAAATCGTGGTAAATC
GGATAACGTTCCAAGTGAAGAAGTAGTCAAAAAGATGAAAAACTATTGGA
GACAACTTCTAAACGCCAAGTTAATCACTCAACGTAAGTTTGATAATTTA
ACGAAAGCTGAACGTGGAGGTTTGAGTGAACTTGATAAAGCTGGTTTTAT
CAAACGCCAATTGGTTGAAACTCGCCAAATCACTAAGCATGTGGCACAAA
TTTTGGATAGTCGCATGAATACTAAATACGATGAAAATGATAAACTTATT
CGAGAGGTTAAAGTGATTACCTTAAAATCTAAATTAGTTTCTGACTTCCG
AAAAGATTTCCAATTCTATAAAGTACGTGAGATTAACAATTACCATCATG
CCCATGATGCGTATCTAAATGCCGTCGTTGGAACTGCTTTGATTAAGAAA
TATCCAAAACTTGAATCGGAGTTTGTCTATGGTGATTATAAAGTTTATGA
TGTTCGTAAAATGATTGCTAAGTCTGAGCAAGAAATAGGCAAAGCAACCG
CAAAATATTTCTTTTACTCTAATATCATGAACTTCTTCAAAACAGAAATT
ACACTTGCAAATGGAGAGATTCGCAAACGCCCTCTAATCGAAACTAATGG
GGAAACTGGAGAAATTGTCTGGGATAAAGGGCGAGATTTTGCCACAGTGC
GCAAAGTATTGTCCATGCCCCAAGTCAATATTGTCAAGAAAACAGAAGTA
CAGACAGGCGGATTCTCCAAGGAGTCAATTTTACCAAAAAGAAATTCGGA
CAAGCTTATTGCTCGTAAAAAAGACTGGGATCCAAAAAAATATGGTGGTT
TTGATAGTCCAACGGTAGCTTATTCAGTCCTAGTGGTTGCTAAGGTGGAA
AAAGGGAAATCGAAGAAGTTAAAATCCGTTAAAGAGTTACTAGGGATCAC
AATTATGGAAAGAAGTTCCTTTGAAAAAAATCCGATTGACTTTTTAGAAG
CTAAAGGATATAAGGAAGTTAAAAAAGACTTAATCATTAAACTACCTAAA
TATAGTCTTTTTGAGTTAGAAAACGGTCGTAAACGGATGCTGGCTAGTGC
CGGAGAATTACAAAAAGGAAATGAGCTGGCTCTGCCAAGCAAATATGTGA
ATTTTTTATATTTAGCTAGTCATTATGAAAAGTTGAAGGGTAGTCCAGAA
GATAACGAACAAAAACAATTGTTTGTGGAGCAGCATAAGCATTATTTAGA
TGAGATTATTGAGCAAATCAGTGAATTTTCTAAGCGTGTTATTTTAGCAG
ATGCCAATTTAGATAAAGTTCTTAGTGCATATAACAAACATAGAGACAAA
CCAATACGTGAACAAGCAGAAAATATTATTCATTTATTTACGTTGACGAA
TCTTGGAGCTCCCGCTGCTTTTAAATATTTTGATACAACAATTGATCGTA
AACGATATACGTCTACAAAAGAAGTTTTAGATGCCACTCTTATCCATCAA
TCCATCACTGGTCTTTATGAAACACGCATTGATTTGAGTCAGCTAGGAGG
TGACTGA
(SEQ ID NO: 6)
[sequence omitted]
(single underline: HNH domain; double underline:
RuvC domain)

[0220] In some embodiments, Cas9 refers to Cas9 from: Corynebacterium ulcerans (NCBI Refs: NC_015683.1, NC_017317.1); Corynebacterium diphtheria (NCBI Refs: NC_016782.1, NC_016786.1); Spiroplasma syrphidicola (NCBI Ref: NC_021284.1); Prevotella intermedia (NCBI Ref: NC_017861.1); Spiroplasma taiwanense (NCBI Ref: NC_021846.1); Streptococcus iniae (NCBI Ref: NC_021314.1); Belliella baltica (NCBI Ref: NC_018010.1); Psychroflexus torquisI (NCBI Ref: NC_018721.1); Streptococcus thermophilus (NCBI Ref: YP_820832.1), Listeria innocua (NCBI Ref: NP_472073.1), Campylobacter jejuni (NCBI Ref: YP_002344900.1) or Neisseria. meningitidis (NCBI Ref: YP_002342100.1) or to a Cas9 from any of the organisms listed in Example 5.

[0221] In some embodiments, dCas9 corresponds to, or comprises in part or in whole, a Cas9 amino acid sequence having one or more mutations that inactivate the Cas9 nuclease activity. For example, in some embodiments, a dCas9 domain comprises D10A and/or H840A mutation.

dCas9 (D10A and H840A):

(SEQ ID NO: 7)
MDKKYSIGLAIGTNSVGWAVITDEYKVPSKKFKVLGNTDRHSIKKNLIGA
LLFDSGETAEATRLKRTARRRYTRRKNRICYLQEIFSNEMAKVDDSFFHR
LEESFLVEEDKKHERHPIFGNIVDEVAYHEKYPTIYHLRKKLVDSTDKAD
LRLIYLALAHMIKFRGHFLIEGDLNPDNSDVDKLFIQLVQTYNQLFEENP
INASGVDAKAILSARLSKSRRLENLIAQLPGEKKNGLFGNLIALSLGLTP
NFKSNFDLAEDAKLQLSKDTYDDDLDNLLAQIGDQYADLFLAAKNLSDAI
LLSDILRVNTEITKAPLSASMIKRYDEHHQDLTLLKALVRQQLPEKYKEI
FFDQSKNGYAGYIDGGASQEEFYKFIKPILEKMDGTEELLVKLNREDLLR
KQRTFDNGSIPHQIHLGELHAILRRQEDFYPFLKDNREKIEKILTFRIPY
YVGPLARGNSRFAWMTRKSEETITPWNFEEVVDKGASAQSFIERMTNFDK
NLPNEKVLPKHSLLYEYFTVYNELTKVKYVTEGMRKPAFLSGEQKKAIVD
LLFKTNRKVTVKQLKEDYFKKIECFDSVETSGVEDRFNASLGTYHDLLKI
IKDKDFLDNEENEDILEDIVLTLTLFEDREMIEERLKTYAHLFDDKVMKQ
LKRRRYTGWGRLSRKLINGIRDKQSGKTILDFLKSDGFANRNFMQLIHDD

[chemical structure]

[chemical structure]

PVENTQLQNEKLYLYYLQNGRDMYVDQELDINRLSDYDVDAIVPQSFLKD
DSIDNKVLTRSDKNRGKSDNVPSEEVVKKMKNYWRQLLNAKLITQRKFDN

[chemical structure]

[chemical structure]

[chemical structure]

[chemical structure]

[chemical structure]

EKGKSKKLKSVKELLGITIMERSSFEKNPIDFLEAKGYKEVKKDLIIKLP
KYSLFELENGRKRMLASAGELQKGNELALPSKYVNFLYLASHYEKLKGSP
EDNEQKQLFVEQHKHYLDEIIEQISEFSKRVILADANLDKVLSAYNKHRD
KPIREQAENIIHLFTLTNLGAPAAFKYFDTTIDRKRYTSTKEVLDATLIH
QSITGLYETRIDLSQLGGD (single underline: HNH domain;
(double underline: RuvC domain).

[0222] In some embodiments, the Cas9 domain comprises a D10A mutation, while the residue at position 840 remains a histidine in the amino acid sequence provided in SEQ ID NO: 6, or at corresponding positions in any of the amino acid sequences provided in another Cas9 domain, such as any of the Cas9 proteins provided herein. Without wishing to be bound by any particular theory, the presence of the catalytic residue H840 restores the acvitity of the Cas9 to cleave the non-edited (e.g., non-deaminated) strand containing a G opposite the targeted C. Restoration of H840 (e.g., from A840) does not result in the cleavage of the target strand containing the C. Such Cas9 variants are able to generate a single-strand DNA break (nick) at a specific location based on the gRNA-defined target sequence, leading to repair of the non-edited strand, ultimately resulting in a G to A change on the non-edited strand. A schematic representation of this process is shown in FIG. 108. Briefly, the C of a C-G basepair can be deaminated to a U by a deaminase, e.g., an APOBEC deamonase. Nicking the non-edited strand, having the G, facilitates removal of the G via mismatch repair mechanisms. UGI inhibits UDG, which prevents removal of the U.

[0223] In other embodiments, dCas9 variants having mutations other than D10A and H840A are provided, which, e.g., result in nuclease inactivated Cas9 (dCas9). Such mutations, by way of example, include other amino acid substitutions at D10 and H820, or other substitutions within the nuclease domains of Cas9 (e.g., substitutions in the HNH nuclease subdomain and/or the RuvC1 subdomain). In some embodiments, variants or homologues of dCas9 (e.g., variants of SEQ ID NO: 6) are provided which are at least about 70% identical, at least about 80% identical, at least about 90% identical, at least about 95% identical, at least about 98% identical, at least about 99% identical, at least about 99.5% identical, or at least about 99.9% identical to SEQ ID NO: 6. In some embodiments, variants of dCas9 (e.g., variants of SEQ ID NO: 6) are provided having amino acid sequences which are shorter, or longer than SEQ ID NO: 6, by about 5 amino acids, by about 10 amino acids, by about 15 amino acids, by about 20 amino acids, by about 25 amino acids, by about 30 amino acids, by about 40 amino acids, by about 50 amino acids, by about 75 amino acids, by about 100 amino acids or more.

[0224] In some embodiments, Cas9 fusion proteins as provided herein comprise the full-length amino acid sequence of a Cas9 protein, e.g., one of the Cas9 sequences provided herein. In other embodiments, however, fusion proteins as provided herein do not comprise a full-length Cas9 sequence, but only a fragment thereof. For example, in some embodiments, a Cas9 fusion protein provided herein comprises a Cas9 fragment, wherein the fragment binds crRNA and tracrRNA or sgRNA, but does not comprise a functional nuclease domain, e.g., in that it comprises only a truncated version of a nuclease domain or no nuclease domain at all. Exemplary amino acid sequences of suitable Cas9 domains and Cas9 fragments are provided herein, and additional suitable sequences of Cas9 domains and fragments will be apparent to those of skill in the art.

[0225] In some embodiments, Cas9 refers to Cas9 from: Corynebacterium ulcerans (NCBI Refs: NC_015683.1, NC_017317.1); Corynebacterium diphtheria (NCBI Refs: NC_016782.1, NC_016786.1); Spiroplasma syrphidicola (NCBI Ref: NC_021284.1); Prevotella intermedia (NCBI Ref: NC_017861.1); Spiroplasma taiwanense (NCBI Ref: NC_021846.1); Streptococcus iniae (NCBI Ref: NC_021314.1); Belliella baltica (NCBI Ref: NC_018010.1); Psychroflexus torquis I (NCBI Ref: NC_018721.1); Streptococcus thermophilus (NCBI Ref: YP_820832.1); Listeria innocua (NCBI Ref: NP_472073.1); Campylobacter jejuni (NCBI Ref: YP_002344900.1); or Neisseria. meningitidis (NCBI Ref: YP_002342100.1).

[0226] The term “deaminase” or “deaminase domain,” as used herein, refers to a protein or enzyme that catalyzes a deamination reaction. In some embodiments, the deaminase or deaminase domain is a cytidine deaminase, catalyzing the hydrolytic deamination of cytidine or deoxycytidine to uridine or deoxyuridine, respectively. In some embodiments, the deaminase or deaminase domain is a cytidine deaminase domain, catalyzing the hydrolytic deamination of cytosine to uracil. In some embodiments, the deaminase or deaminase domain is a naturally-occurring deaminase from an organism, such as a human, chimpanzee, gorilla, monkey, cow, dog, rat, or mouse. In some embodiments, the deaminase or deaminase domain is a variant of a naturally-occurring deaminase from an organism, that does not occur in nature. For example, in some embodiments, the deaminase or deaminase domain is at least 50%, at least 55%, at least 60%, at least 65%, at least 70%, at least 75% at least 80%, at least 85%, at least 90%, at least 95%, at least 96%, at least 97%, at least 98%, at least 99%, or at least 99.5% identical to a naturally-occurring deaminase from an organism.

[0227] The term “effective amount,” as used herein, refers to an amount of a biologically active agent that is sufficient to elicit a desired biological response. For example, in some embodiments, an effective amount of a nuclease may refer to the amount of the nuclease that is sufficient to induce cleavage of a target site specifically bound and cleaved by the nuclease. In some embodiments, an effective amount of a fusion protein provided herein, e.g., of a fusion protein comprising a nuclease-inactive Cas9 domain and a nucleic acid editing domain (e.g., a deaminase domain) may refer to the amount of the fusion protein that is sufficient to induce editing of a target site specifically bound and edited by the fusion protein. As will be appreciated by the skilled artisan, the effective amount of an agent, e.g., a fusion protein, a nuclease, a deaminase, a recombinase, a hybrid protein, a protein dimer, a complex of a protein (or protein dimer) and a polynucleotide, or a polynucleotide, may vary depending on various factors as, for example, on the desired biological response, e.g., on the specific allele, genome, or target site to be edited, on the cell or tissue being targeted, and on the agent being used.

[0228] The term “linker,” as used herein, refers to a chemical group or a molecule linking two molecules or moieties, e.g., two domains of a fusion protein, such as, for example, a nuclease-inactive Cas9 domain and a nucleic acid editing domain (e.g., a deaminase domain). A linker may be, for example, an amino acid sequence, a peptide, or a polymer of any length and composition. In some embodiments, a linker joins a gRNA binding domain of an RNA-programmable nuclease, including a Cas9 nuclease domain, and the catalytic domain of anucleic-acid editing protein. In some embodiments, a linker joins a dCas9 and a nucleic-acid editing protein. Typically, the linker is positioned between, or flanked by, two groups, molecules, or other moieties and connected to each one via a covalent bond, thus connecting the two. In some embodiments, the linker is an amino acid or a plurality of amino acids (e.g., a peptide or protein). In some embodiments, the linker is an organic molecule, group, polymer, or chemical moiety. In some embodiments, the linker is 1-100 amino acids in length, for example, 1, 2, 3, 4, 5, 6, 7, 8, 9, 10, 11, 12, 13, 14, 15, 16, 17, 18, 19, 20, 21, 22, 23, 24, 25, 26, 27, 28, 29, 30, 30-35, 35-40, 40-45, 45-50, 50-60, 60-70, 70-80, 80-90, 90-100, 100-150, or 150-200 amino acids in length. Longer or shorter linkers are also contemplated.

[0229] The term “mutation,” as used herein, refers to a substitution of a residue within a sequence, e.g., a nucleic acid or amino acid sequence, with another residue, or a deletion or insertion of one or more residues within a sequence. Mutations are typically described herein by identifying the original residue followed by the position of the residue within the sequence and by the identity of the newly substituted residue. Various methods for making the amino acid substitutions (mutations) provided herein are well known in the art, and are provided by, for example, Green and Sambrook, Molecular Cloning: A Laboratory Manual (4^{th} ed., Cold Spring Harbor Laboratory Press, Cold Spring Harbor, N.Y. (2012)).

[0230] The terms “nucleic acid” and “nucleic acid molecule,” as used herein, refer to a compound comprising a nucleobase and an acidic moiety, e.g., a nucleoside, a nucleotide, or a polymer of nucleotides. Typically, polymeric nucleic acids, e.g., nucleic acid molecules comprising three or more nucleotides are linear molecules, in which adjacent nucleotides are linked to each other via a phosphodiester linkage. In some embodiments, “nucleic acid” refers to individual nucleic acid residues (e.g. nucleotides and/or nucleosides). In some embodiments, “nucleic acid” refers to an oligonucleotide chain comprising three or more individual nucleotide residues. As used herein, the terms “oligonucleotide” and “polynucleotide” can be used interchangeably to refer to a polymer of nucleotides (e.g., a string of at least three nucleotides). In some embodiments, “nucleic acid” encompasses RNA as well as single and/or double-stranded DNA. Nucleic acids may be naturally occurring, for example, in the context of a genome, a transcript, an mRNA, tRNA, rRNA, siRNA, snRNA, a plasmid, cosmid, chromosome, chromatid, or other naturally occurring nucleic acid molecule. On the other hand, a nucleic acid molecule may be a non-naturally occurring molecule, e.g., a recombinant DNA or RNA, an artificial chromosome, an engineered genome, or fragment thereof, or a synthetic DNA, RNA, DNA/RNA hybrid, or including non-naturally occurring nucleotides or nucleosides. Furthermore, the terms “nucleic acid,” “DNA,” “RNA,” and/or similar terms include nucleic acid analogs, e.g., analogs having other than a phosphodiester backbone. Nucleic acids can be purified from natural sources, produced using recombinant expression systems and optionally purified, chemically synthesized, etc. Where appropriate, e.g., in the case of chemically synthesized molecules, nucleic acids can comprise nucleoside analogs such as analogs having chemically modified bases or sugars, and backbone modifications. A nucleic acid sequence is presented in the 5′ to 3′ direction unless otherwise indicated. In some embodiments, a nucleic acid is or comprises natural nucleosides (e.g. adenosine, thymidine, guanosine, cytidine, uridine, deoxyadenosine, deoxythymidine, deoxyguanosine, and deoxycytidine); nucleoside analogs (e.g., 2-aminoadenosine, 2-thiothymidine, inosine, pyrrolo-pyrimidine, 3-methyl adenosine, 5-methylcytidine, 2-aminoadenosine, C5-bromouridine, C5-fluorouridine, C5-iodouridine, C5-propynyl-uridine, C5-propynyl-cytidine, C5-methylcytidine, 2-aminoadenosine, 7-deazaadenosine, 7-deazaguanosine, 8-oxoadenosine, 8-oxoguanosine, O(6)-methylguanine, and 2-thiocytidine); chemically modified bases; biologically modified bases (e.g., methylated bases); intercalated bases; modified sugars (e.g., 2′-fluororibose, ribose, 2′-deoxyribose, arabinose, and hexose); and/or modified phosphate groups (e.g., phosphorothioates and 5′-N-phosphoramidite linkages).

[0231] The term “nucleic acid editing domain,” as used herein refers to a protein or enzyme capable of making one or more modifications (e.g., deamination of a cytidine residue) to a nucleic acid (e.g., DNA or RNA). Exemplary nucleic acid editing domains include, but are not limited to a deaminase, a nuclease, a nickase, a recombinase, a methyltransferase, a methylase, an acetylase, an acetyltransferase, a transcriptional activator, or a transcriptional repressor domain. In some embodiments the nucleic acid editing domain is a deaminase (e.g., a cytidine deaminase, such as an APOBEC or an AID deaminase).

[0232] The term “proliferative disease,” as used herein, refers to any disease in which cell or tissue homeostasis is disturbed in that a cell or cell population exhibits an abnormally elevated proliferation rate. Proliferative diseases include hyperproliferative diseases, such as pre-neoplastic hyperplastic conditions and neoplastic diseases. Neoplastic diseases are characterized by an abnormal proliferation of cells and include both benign and malignant neoplasias. Malignant neoplasia is also referred to as cancer.

[0233] The terms “protein,” “peptide,” and “polypeptide” are used interchangeably herein, and refer to a polymer of amino acid residues linked together by peptide (amide) bonds. The terms refer to a protein, peptide, or polypeptide of any size, structure, or function. Typically, a protein, peptide, or polypeptide will be at least three amino acids long. A protein, peptide, or polypeptide may refer to an individual protein or a collection of proteins. One or more of the amino acids in a protein, peptide, or polypeptide may be modified, for example, by the addition of a chemical entity such as a carbohydrate group, a hydroxyl group, a phosphate group, a farnesyl group, an isofarnesyl group, a fatty acid group, a linker for conjugation, functionalization, or other modification, etc. A protein, peptide, or polypeptide may also be a single molecule or may be a multi-molecular complex. A protein, peptide, or polypeptide may be just a fragment of a naturally occurring protein or peptide. A protein, peptide, or polypeptide may be naturally occurring, recombinant, or synthetic, or any combination thereof. The term “fusion protein” as used herein refers to a hybrid polypeptide which comprises protein domains from at least two different proteins. One protein may be located at the amino-terminal (N-terminal) portion of the fusion protein or at the carboxy-terminal (C-terminal) protein thus forming an “amino-terminal fusion protein” or a “carboxy-terminal fusion protein,” respectively. A protein may comprise different domains, for example, a nucleic acid binding domain (e.g., the gRNA binding domain of Cas9 that directs the binding of the protein to a target site) and a nucleic acid cleavage domain or a catalytic domain of a nucleic-acid editing protein. In some embodiments, a protein comprises a proteinaceous part, e.g., an amino acid sequence constituting a nucleic acid binding domain, and an organic compound, e.g., a compound that can act as a nucleic acid cleavage agent. In some embodiments, a protein is in a complex with, or is in association with, a nucleic acid, e.g., RNA. Any of the proteins provided herein may be produced by any method known in the art. For example, the proteins provided herein may be produced via recombinant protein expression and purification, which is especially suited for fusion proteins comprising a peptide linker. Methods for recombinant protein expression and purification are well known, and include those described by Green and Sambrook, Molecular Cloning: A Laboratory Manual (4^{th} ed., Cold Spring Harbor Laboratory Press, Cold Spring Harbor, N.Y. (2012)), the entire contents of which are incorporated herein by reference.

[0234] The term “subject,” as used herein, refers to an individual organism, for example, an individual mammal. In some embodiments, the subject is a human. In some embodiments, the subject is a non-human mammal. In some embodiments, the subject is a non-human primate. In some embodiments, the subject is a rodent. In some embodiments, the subject is a sheep, a goat, a cattle, a cat, or a dog. In some embodiments, the subject is a vertebrate, an amphibian, a reptile, a fish, an insect, a fly, or a nematode. In some embodiments, the subject is a research animal. In some embodiments, the subject is genetically engineered, e.g., a genetically engineered non-human subject. The subject may be of either sex and at any stage of development.

[0235] The term “target site” refers to a sequence within a nucleic acid molecule that is deaminated by a deaminase or a fusion protein comprising a deaminase, (e.g., a dCas9-deaminase fusion protein provided herein).

[0236] The terms “treatment,” “treat,” and “treating” refer to a clinical intervention aimed to reverse, alleviate, delay the onset of, or inhibit the progress of a disease or disorder, or one or more symptoms thereof, as described herein. As used herein, the terms “treatment,” “treat,” and “treating” refer to a clinical intervention aimed to reverse, alleviate, delay the onset of, or inhibit the progress of a disease or disorder, or one or more symptoms thereof, as described herein. In some embodiments, treatment may be administered after one or more symptoms have developed and/or after a disease has been diagnosed. In other embodiments, treatment may be administered in the absence of symptoms, e.g., to prevent or delay onset of a symptom or inhibit onset or progression of a disease. For example, treatment may be administered to a susceptible individual prior to the onset of symptoms (e.g., in light of a history of symptoms and/or in light of genetic or other susceptibility factors). Treatment may also be continued after symptoms have resolved, for example, to prevent or delay their recurrence.

[0237] The term “recombinant” as used herein in the context of proteins or nucleic acids refers to proteins or nucleic acids that do not occur in nature, but are the product of human engineering. For example, in some embodiments, a recombinant protein or nucleic acid molecule comprises an amino acid or nucleotide sequence that comprises at least one, at least two, at least three, at least four, at least five, at least six, or at least seven mutations as compared to any naturally occurring sequence.

[0238] The term “pharmaceutical composition,” as used herein, refers to a composition that can be administrated to a subject in the context of treatment of a disease or disorder. In some embodiments, a pharmaceutical composition comprises an active ingredient, e.g., a nuclease or a nucleic acid encoding a nuclease, and a pharmaceutically acceptable excipient.

[0239] The term “base editor (BE),” or “nucleobase editor (NBE),” as used herein, refers to an agent comprising a polypeptide that is capable of making a modification to a base (e.g., A, T, C, G, or U) within a nucleic acid sequence (e.g., DNA or RNA). In some embodiments, the base editor is capable of deaminating a base within a nucleic acid. In some embodiments, the base editor is capable of deaminating a base within a DNA molecule. In some embodiments, the base editor is capable of deaminating an cytosine (C) in DNA. In some embodiments, the base editor is a fusion protein comprising a nucleic acid programmable DNA binding protein (napDNAbp) fused to a cytidine deaminase domain. In some embodiments, the base editor comprises a Cas9 (e.g., dCas9 and nCas9), CasX, CasY, Cpf1, C2c1, C2c2, C2c3, or Argonaute protein fused to a cytidine deaminase. In some embodiments, the base editor comprises a Cas9 nickase (nCas9) fused to an cytidine deaminase. In some embodiments, the base editor comprises a nuclease-inactive Cas9 (dCas9) fused to a cytidine deaminase. In some embodiments, the base editor is fused to an inhibitor of base excision repair, for example, a UGI domain. In some embodiments, the base editor comprises a CasX protein fused to a cytidine deaminase. In some embodiments, the base editor comprises a CasY protein fused to a cytidine deaminase. In some embodiments, the base editor comprises a Cpf1 protein fused to a cytidine deaminase. In some embodiments, the base editor comprises a C2c1 protein fused to a cytidine deaminase. In some embodiments, the base editor comprises a C2c2 protein fused to a cytidine deaminase. In some embodiments, the base editor comprises a C2c3 protein fused to a cytidine deaminase. In some embodiments, the base editor comprises an Argonaute protein fused to a cytidine deaminase.

[0240] The term “uracil glycosylase inhibitor” or “UGI,” as used herein, refers to a protein that is capable of inhibiting a uracil-DNA glycosylase base-excision repair enzyme.

[0241] The term “Cas9 nickase,” as used herein, refers to a Cas9 protein that is capable of cleaving only one strand of a duplexed nucleic acid molecule (e.g., a duplexed DNA molecule). In some embodiments, a Cas9 nickase comprises a D10A mutation and has a histidine at position H840 of SEQ ID NO: 6, or a corresponding mutation in another Cas9 domain, such as any of the Cas9 proteins provided herein. For example, a Cas9 nickase may comprise the amino acid sequence as set forth in SEQ ID NO: 8. Such a Cas9 nickase has an active HNH nuclease domain and is able to cleave the non-targeted strand of DNA, i.e., the strand bound by the gRNA. Further, such a Cas9 nickase has an inactive RuvC nuclease domain and is not able to cleave the targeted strand of the DNA, i.e., the strand where base editing is desired.

[0242] Exemplary Cas9 nickase (Cloning vector pPlatTET-gRNA2; Accession No. BAV54124).

(SEQ ID NO: 8)
MDKKYSIGLAIGTNSVGWAVITDEYKVPSKKFKVLGNTDRHSIKKNLIGA
LLFDSGETAEATRLKRTARRRYTRRKNRICYLQEIFSNEMAKVDDSFFHR
LEESFLVEEDKKHERHPIFGNIVDEVAYHEKYPTIYHLRKKLVDSTDKAD
LRLIYLALAHMIKFRGHFLIEGDLNPDNSDVDKLFIQLVQTYNQLFEENP
INASGVDAKAILSARLSKSRRLENLIAQLPGEKKNGLFGNLIALSLGLTP
NFKSNFDLAEDAKLQLSKDTYDDDLDNLLAQIGDQYADLFLAAKNLSDAI
LLSDILRVNTEITKAPLSASMIKRYDEHHQDLTLLKALVRQQLPEKYKEI
FFDQSKNGYAGYIDGGASQEEFYKFIKPILEKMDGTEELLVKLNREDLLR
KQRTFDNGSIPHQIHLGELHAILRRQEDFYPFLKDNREKIEKILTFRIPY
YVGPLARGNSRFAWMTRKSEETITPWNFEEVVDKGASAQSFIERMTNFDK
NLPNEKVLPKHSLLYEYFTVYNELTKVKYVTEGMRKPAFLSGEQKKAIVD
LLFKTNRKVTVKQLKEDYFKKIECFDSVEISGVEDRFNASLGTYHDLLKI
IKDKDFLDNEENEDILEDIVLTLTLFEDREMIEERLKTYAHLFDDKVMKQ
LKRRRYTGWGRLSRKLINGIRDKQSGKTILDFLKSDGFANRNFMQLIHDD
SLTFKEDIQKAQVSGQGDSLHEHIANLAGSPAIKKGILQTVKVVDELVKV
MGRHKPENIVIEMARENQTTQKGQKNSRERMKRIEEGIKELGSQILKEHP
VENTQLQNEKLYLYYLQNGRDMYVDQELDINRLSDYDVDHIVPQSFLKDD
SIDNKVLTRSDKNRGKSDNVPSEEVVKKMKNYWRQLLNAKLITQRKFDNL
TKAERGGLSELDKAGFIKRQLVETRQITKHVAQILDSRMNTKYDENDKLI
REVKVITLKSKLVSDFRKDFQFYKVREINNYHHAHDAYLNAVVGTALIKK
YPKLESEFVYGDYKVYDVRKMIAKSEQEIGKATAKYFFYSNIMNFFKTEI
TLANGEIRKRPLIETNGETGEIVWDKGRDFATVRKVLSMPQVNIVKKTEV
QTGGFSKESILPKRNSDKLIARKKDWDPKKYGGFDSPTVAYSVLVVAKVE
KGKSKKLKSVKELLGITIMERSSFEKNPIDFLEAKGYKEVKKDLIIKLPK
YSLFELENGRKRMLASAGELQKGNELALPSKYVNFLYLASHYEKLKGSPE
DNEQKQLFVEQHKHYLDEIIEQISEFSKRVILADANLDKVLSAYNKHRDK
PIREQAENIIHLFTLTNLGAPAAFKYFDTTIDRKRYTSTKEVLDATLIHQ
SITGLYETRIDLSQLGGD

### DETAILED DESCRIPTION OF CERTAIN EMBODIMENTS OF THE INVENTION

[0243] Some aspects of this disclosure provide fusion proteins that comprise a domain capable of binding to a nucleotide sequence (e.g., a Cas9, or a Cpf1 protein) and an enzyme domain, for example, a DNA-editing domain, such as, e.g., a deaminase domain. The deamination of a nucleobase by a deaminase can lead to a point mutation at the respective residue, which is referred to herein as nucleic acid editing. Fusion proteins comprising a Cas9 variant or domain and a DNA editing domain can thus be used for the targeted editing of nucleic acid sequences. Such fusion proteins are useful for targeted editing of DNA in vitro, e.g., for the generation of mutant cells or animals; for the introduction of targeted mutations, e.g., for the correction of genetic defects in cells ex vivo, e.g., in cells obtained from a subject that are subsequently re-introduced into the same or another subject; and for the introduction of targeted mutations, e.g., the correction of genetic defects or the introduction of deactivating mutations in disease-associated genes in a subject. Typically, the Cas9 domain of the fusion proteins described herein does not have any nuclease activity but instead is a Cas9 fragment or a dCas9 protein or domain. Other aspects of the invention provide fusion proteins that comprise (i) a domain capable of binding to a nucleic acid sequence (e.g., a Cas9, or a Cpf1 protein); (ii) an enzyme domain, for example, a DNA-editing domain (e.g., a deaminase domain); and (iii) one or more uracil glycosylase inhibitor (UGI) domains. The presence of at least one UGI domain increases base editing efficiency compared to fusion proteins without a UGI domain. A fusion protein comprising two UGI domains further increases base editing efficiency and product purity compared to fusion proteins with one UGI domain or without a UGI domain. Methods for the use of Cas9 fusion proteins as described herein are also provided.

### Nucleic Acid Programmable DNA Binding Proteins

[0244] Some aspects of the disclosure provide nucleic acid programmable DNA binding proteins, which may be used to guide a protein, such as a base editor, to a specific nucleic acid (e.g., DNA or RNA) sequence. It should be appreciated that any of the fusion proteins (e.g., base editors) provided herein may include any nucleic acid programmable DNA binding protein (napDNAbp). For example, any of the fusion proteins described herein that include a Cas9 domain, can use another napDNAbp, such as CasX, CasY, Cpf1, C2c1, C2c2, C2c3, and Argonaute, in place of the Cas9 domain. Nucleic acid programmable DNA binding proteins include, without limitation, Cas9 (e.g., dCas9 and nCas9), CasX, CasY, Cpf1, C2c1, C2c2, C2C3, and Argonaute. One example of a nucleic acid programmable DNA-binding protein that has a different PAM specificity than Cas9 is Clustered Regularly Interspaced Short Palindromic Repeats from Prevotella and Francisella 1 (Cpf1). Similar to Cas9, Cpf1 is also a class 2 CRISPR effector. It has been shown that Cpf1 mediates robust DNA interference with features distinct from Cas9. Cpf1 is a single RNA-guided endonuclease lacking tracrRNA, and it utilizes a T-rich protospacer-adjacent motif (TTN, TTTN, or YTN). Moreover, Cpf1 cleaves DNA via a staggered DNA double-stranded break. Out of 16 Cpf1-family proteins, two enzymes from Acidaminococcus and Lachnospiraceae are shown to have efficient genome-editing activity in human cells. Cpf1 proteins are known in the art and have been described previously, for example, Yamano et al., “Crystal structure of Cpf1 in complex with guide RNA and target DNA.” Cell (165) 2016, p. 949-962; the entire contents of which are incorporated herein by reference.

[0245] Also useful in the present compositions and methods are nuclease-inactive Cpf1 (dCpf1) variants that may be used as a guide nucleotide sequence-programmable DNA-binding protein domain. The Cpf1 protein has a RuvC-like endonuclease domain that is similar to the RuvC domain of Cas9 but does not have a HNH endonuclease domain, and the N-terminal of Cpf1 does not have the alpha-helical recognition lobe of Cas9. It was shown in Zetsche et al., Cell, 163, 759-771, 2015 (which is incorporated herein by reference) that, the RuvC-like domain of Cpf1 is responsible for cleaving both DNA strands and inactivation of the RuvC-like domain inactivates Cpf1 nuclease activity. For example, mutations corresponding to D917A, E1006A, or D1255A in Francisella novicida Cpf1 (SEQ ID NO: 15) inactivate Cpf1 nuclease activity. In some embodiments, the dead Cpf1 (dCpf1) comprises mutations corresponding to D917A, E1006A, D1255A, D917A/E1006A, D917A/D1255A, E1006A/D1255A, or D917A/E1006A/D1255A in SEQ ID NO: 9. It is to be understood that any mutations, e.g., substitution mutations, deletions, or insertions, that inactivate the RuvC domain of Cpf1, may be used in accordance with the present disclosure.

[0246] In some embodiments, the nucleic acid programmable DNA binding protein (napDNAbp) of any of the fusion proteins provided herein is a Cpf1 protein. In some embodiments, the Cpf1 protein is a Cpf1 nickase (nCpf1). In some embodiments, the Cpf1 protein is a nuclease inactive Cpf1 (dCpf1). In some embodiments, the Cpf1, the nCpf1, or the dCpf1 comprises an amino acid sequence that is at least 85%, at least 90%, at least 91%, at least 92%, at least 93%, at least 94%, at least 95%, at least 96%, at least 97%, at least 98%, at least 99%, or at least 99.5% identical to any one of SEQ ID NOs: 9-24. In some embodiments, the dCpf1 comprises an amino acid sequence that is at least 85%, at least 90%, at least 91%, at least 92%, at least 93%, at least 94%, at least 95%, at least 96%, at least 97%, at least 98%, at least 99%, or at least 99.5% identical to any one of SEQ ID NOs: 9-16, and comprises mutations corresponding to D917A, E1006A, D1255A, D917A/E1006A, D917A/D1255A, E1006A/D1255A, or D917A/E1006A/D1255A in SEQ ID NO: 9. In some embodiments, the dCpf1 protein comprises an amino acid sequence of any one SEQ ID NOs: 9-16. It should be appreciated that Cpf1 from other species may also be used in accordance with the present disclosure.

Wild type Francisella novicida Cpf1 (SEQ ID NO: 9) (D917, E1006, and D1255 are bolded and underlined)

(SEQ ID NO: 9)

MSIYQEFVNKYSLSKTLRFELIPQGKTLENIKARGLILDDEKRAKDYKKA
KQIIDKYHQFFIEEILSSVCISEDLLQNYSDVYFKLKKSDDDNLQKDFKS
AKDTIKKQISEYIKDSEKFKNLFNQNLIDAKKGQESDLILWLKQSKDNGI
ELFKANSDITDIDEALEIIKSFKGWTTYFKGFHENRKNVYSSNDIPTSII
YRIVDDNLPKFLENKAKYESLKDKAPEAINYEQIKKDLAEELTFDIDYKT
SEVNQRVFSLDEVFEIANFNNYLNQSGITKFNTIIGGKFVNGENTKRKGI
NEYINLYSQQINDKTLKKYKMSVLFKQILSDTESKSFVIDKLEDDSDVVT
TMQSFYEQIAAFKTVEEKSIKETLSLLFDDLKAQKLDLSKIYFKNDKSLT
DLSQQVFDDYSVIGTAVLEYITQQIAPKNLDNPSKKEQELIAKKTEKAKY
LSLETIKLALEEFNKHRDIDKQCRFEEILANFAAIPMIFDEIAQNKDNLA
QISIKYQNQGKKDLLQASAEDDVKAIKDLLDQTNNLLHKLKIFHISQSED
KANILDKDEHFYLVFEECYFELANIVPLYNKIRNYITQKPYSDEKFKLNF
ENSTLANGWDKNKEPDNTAILFIKDDKYYLGVMNKKNNKIFDDKAIKENK
GEGYKKIVYKLLPGANKMLPKVFFSAKSIKFYNPSEDILRIRNHSTHTKN
GSPQKGYEKFEFNIEDCRKFIDFYKQSISKHPEWKDFGFRFSDTQRYNSI
DEFYREVENQGYKLTFENISESYIDSVVNQGKLYLFQIYNKDFSAYSKGR
PNLHTLYWKALFDERNLQDVVYKLNGEAELFYRKQSIPKKITHPAKEAIA
NKNKDNPKKESVFEYDLIKDKRFTEDKFFFHCPITINFKSSGANKFNDEI
NLLLKEKANDVHILSIDRGERHLAYYTLVDGKGNIIKQDTFNIIGNDRMK
TNYHDKLAAIEKDRDSARKDWKKINNIKEMKEGYLSQVVHEIAKLVIEYN
AIVVFEDLNFGFKRGRFKVEKQVYQKLEKMLIEKLNYLVFKDNEFDKTGG
VLRAYQLTAPFETFKKMGKQTGIIYYVPAGFTSKICPVTGFVNQLYPKYE
SVSKSQEFFSKFDKICYNLDKGYFEFSFDYKNFGDKAAKGKWTIASFGSR
LINFRNSDKNHNWDTREVYPTKELEKLLKDYSIEYGHGECIKAAICGESD
KKFFAKLTSVLNTILQMRNSKTGTELDYLISPVADVNGNFFDSRQAPKNM
PQDADANGAYHIGLKGLMLLGRIKNNQEGKKLNLVIKNEEYFEFVQNRNN

Francisella novicida Cpf1 D917A (SEQ ID NO: 10) (A917, E1006, and D1255 are bolded and underlined)

(SEQ ID NO: 10)

MSIYQEFVNKYSLSKTLRFELIPQGKTLENIKARGLILDDEKRAKDYKKA
KQIIDKYHQFFIEEILSSVCISEDLLQNYSDVYFKLKKSDDDNLQKDFKS
AKDTIKKQISEYIKDSEKFKNLFNQNLIDAKKGQESDLILWLKQSKDNGI
ELFKANSDITDIDEALEIIKSFKGWTTYFKGFHENRKNVYSSNDIPTSII
YRIVDDNLPKFLENKAKYESLKDKAPEAINYEQIKKDLAEELTFDIDYKT
SEVNQRVFSLDEVFEIANFNNYLNQSGITKFNTIIGGKFVNGENTKRKGI
NEYINLYSQQINDKTLKKYKMSVLFKQILSDTESKSFVIDKLEDDSDVVT
TMQSFYEQIAAFKTVEEKSIKETLSLLFDDLKAQKLDLSKIYFKNDKSLT
DLSQQVFDDYSVIGTAVLEYITQQIAPKNLDNPSKKEQELIAKKTEKAKY
LSLETIKLALEEFNKHRDIDKQCRFEEILANFAAIPMIFDEIAQNKDNLA
QISIKYQNQGKKDLLQASAEDDVKAIKDLLDQTNNLLHKLKIFHISQSED
KANILDKDEHFYLVFEECYFELANIVPLYNKIRNYITQKPYSDEKFKLNF
ENSTLANGWDKNKEPDNTAILFIKDDKYYLGVMNKKNNKIFDDKAIKENK
GEGYKKIVYKLLPGANKMLPKVFFSAKSIKFYNPSEDILRIRNHSTHTKN
GSPQKGYEKFEFNIEDCRKFIDFYKQSISKHPEWKDFGFRFSDTQRYNSI
DEFYREVENQGYKLTFENISESYIDSVVNQGKLYLFQIYNKDFSAYSKGR
PNLHTLYWKALFDERNLQDVVYKLNGEAELFYRKQSIPKKITHPAKEAIA
NKNKDNPKKESVFEYDLIKDKRFTEDKFFFHCPITINFKSSGANKFNDEI
NLLLKEKANDVHILSIARGERHLAYYTLVDGKGNIIKQDTFNIIGNDRMK
TNYHDKLAAIEKDRDSARKDWKKINNIKEMKEGYLSQVVHEIAKLVIEYN
AIVVFEDLNFGFKRGRFKVEKQVYQKLEKMLIEKLNYLVFKDNEFDKTGG
VLRAYQLTAPFETFKKMGKQTGIIYYVPAGFTSKICPVTGFVNQLYPKYE
SVSKSQEFFSKFDKICYNLDKGYFEFSFDYKNFGDKAAKGKWTIASFGSR
LINFRNSDKNHNWDTREVYPTKELEKLLKDYSIEYGHGECIKAAICGESD
KKFFAKLTSVLNTILQMRNSKTGTELDYLISPVADVNGNFFDSRQAPKNM
PQDADANGAYHIGLKGLMLLGRIKNNQEGKKLNLVIKNEEYFEFVQNRNN

Francisella novicida Cpf1 E1006A (SEQ ID NO: 11) (D917, A1006, and D1255 are bolded and underlined)

(SEQ ID NO: 11)

MSIYQEFVNKYSLSKTLRFELIPQGKTLENIKARGLILDDEKRAKDYKKA
KQIIDKYHQFFIEEILSSVCISEDLLQNYSDVYFKLKKSDDDNLQKDFKS
AKDTIKKQISEYIKDSEKFKNLFNQNLIDAKKGQESDLILWLKQSKDNGI
ELFKANSDITDIDEALEIIKSFKGWTTYFKGFHENRKNVYSSNDIPTSII
YRIVDDNLPKFLENKAKYESLKDKAPEAINYEQIKKDLAEELTFDIDYKT
SEVNQRVFSLDEVFEIANFNNYLNQSGITKFNTIIGGKFVNGENTKRKGI
NEYINLYSQQINDKTLKKYKMSVLFKQILSDTESKSFVIDKLEDDSDVVT
TMQSFYEQIAAFKTVEEKSIKETLSLLFDDLKAQKLDLSKIYFKNDKSLT
DLSQQVFDDYSVIGTAVLEYITQQIAPKNLDNPSKKEQELIAKKTEKAKY
LSLETIKLALEEFNKHRDIDKQCRFEEILANFAAIPMIFDEIAQNKDNLA
QISIKYQNQGKKDLLQASAEDDVKAIKDLLDQTNNLLHKLKIFHISQSED
KANILDKDEHFYLVFEECYFELANIVPLYNKIRNYITQKPYSDEKFKLNF
ENSTLANGWDKNKEPDNTAILFIKDDKYYLGVMNKKNNKIFDDKAIKENK
GEGYKKIVYKLLPGANKMLPKVFFSAKSIKFYNPSEDILRIRNHSTHTKN
GSPQKGYEKFEFNIEDCRKFIDFYKQSISKHPEWKDFGFRFSDTQRYNSI
DEFYREVENQGYKLTFENISESYIDSVVNQGKLYLFQIYNKDFSAYSKGR
PNLHTLYWKALFDERNLQDVVYKLNGEAELFYRKQSIPKKITHPAKEAIA
NKNKDNPKKESVFEYDLIKDKRFTEDKFFFHCPITINFKSSGANKFNDEI
NLLLKEKANDVHILSIDRGERHLAYYTLVDGKGNIIKQDTFNIIGNDRMK
TNYHDKLAAIEKDRDSARKDWKKINNIKEMKEGYLSQVVHEIAKLVIEYN
AIVVFADLNFGFKRGRFKVEKQVYQKLEKMLIEKLNYLVFKDNEFDKTGG
VLRAYQLTAPFETFKKMGKQTGIIYYVPAGFTSKICPVTGFVNQLYPKYE
SVSKSQEFFSKFDKICYNLDKGYFEFSFDYKNFGDKAAKGKWTIASFGSR
LINFRNSDKNHNWDTREVYPTKELEKLLKDYSIEYGHGECIKAAICGESD
KKFFAKLTSVLNTILQMRNSKTGTELDYLISPVADVNGNFFDSRQAPKNM
PQDADANGAYHIGLKGLMLLGRIKNNQEGKKLNLVIKNEEYFEFVQNRNN

Francisella novicida Cpf1 D1255A (SEQ ID NO: 12) (D917, E1006, and A1255 are bolded and underlined)

(SEQ ID NO: 12)

MSIYQEFVNKYSLSKTLRFELIPQGKTLENIKARGLILDDEKRAKDYKKA
KQIIDKYHQFFIEEILSSVCISEDLLQNYSDVYFKLKKSDDDNLQKDFKS
AKDTIKKQISEYIKDSEKFKNLFNQNLIDAKKGQESDLILWLKQSKDNGI
ELFKANSDITDIDEALEIIKSFKGWTTYFKGFHENRKNVYSSNDIPTSII
YRIVDDNLPKFLENKAKYESLKDKAPEAINYEQIKKDLAEELTFDIDYKT
SEVNQRVFSLDEVFEIANFNNYLNQSGITKFNTIIGGKFVNGENTKRKGI
NEYINLYSQQINDKTLKKYKMSVLFKQILSDTESKSFVIDKLEDDSDVVT
TMQSFYEQIAAFKTVEEKSIKETLSLLFDDLKAQKLDLSKIYFKNDKSLT
DLSQQVFDDYSVIGTAVLEYITQQIAPKNLDNPSKKEQELIAKKTEKAKY
LSLETIKLALEEFNKHRDIDKQCRFEEILANFAAIPMIFDEIAQNKDNLA
QISIKYQNQGKKDLLQASAEDDVKAIKDLLDQTNNLLHKLKIFHISQSED
KANILDKDEHFYLVFEECYFELANIVPLYNKIRNYITQKPYSDEKFKLNF
ENSTLANGWDKNKEPDNTAILFIKDDKYYLGVMNKKNNKIFDDKAIKENK
GEGYKKIVYKLLPGANKMLPKVFFSAKSIKFYNPSEDILRIRNHSTHTKN
GSPQKGYEKFEFNIEDCRKFIDFYKQSISKHPEWKDFGFRFSDTQRYNSI
DEFYREVENQGYKLTFENISESYIDSVVNQGKLYLFQIYNKDFSAYSKGR
PNLHTLYWKALFDERNLQDVVYKLNGEAELFYRKQSIPKKITHPAKEAIA
NKNKDNPKKESVFEYDLIKDKRFTEDKFFFHCPITINFKSSGANKFNDEI
NLLLKEKANDVHILSIDRGERHLAYYTLVDGKGNIIKQDTFNIIGNDRMK
TNYHDKLAAIEKDRDSARKDWKKINNIKEMKEGYLSQVVHEIAKLVIEYN
AIVVFEDLNFGFKRGRFKVEKQVYQKLEKMLIEKLNYLVFKDNEFDKTGG
VLRAYQLTAPFETFKKMGKQTGIIYYVPAGFTSKICPVTGFVNQLYPKYE
SVSKSQEFFSKFDKICYNLDKGYFEFSFDYKNFGDKAAKGKWTIASFGSR
LINFRNSDKNHNWDTREVYPTKELEKLLKDYSIEYGHGECIKAAICGESD
KKFFAKLTSVLNTILQMRNSKTGTELDYLISPVADVNGNFFDSRQAPKNM
PQDAAANGAYHIGLKGLMLLGRIKNNQEGKKLNLVIKNEEYFEFVQNRNN

Francisella novicida Cpf1 D917A/E1006A (SEQ ID NO: 13) (A917, A1006, and D1255 are bolded and underlined)

(SEQ ID NO: 13)

MSIYQEFVNKYSLSKTLRFELIPQGKTLENIKARGLILDDEKRAKDYKKA
KQIIDKYHQFFIEEILSSVCISEDLLQNYSDVYFKLKKSDDDNLQKDFKS
AKDTIKKQISEYIKDSEKFKNLFNQNLIDAKKGQESDLILWLKQSKDNGI
ELFKANSDITDIDEALEIIKSFKGWTTYFKGFHENRKNVYSSNDIPTSII
YRIVDDNLPKFLENKAKYESLKDKAPEAINYEQIKKDLAEELTFDIDYKT
SEVNQRVFSLDEVFEIANFNNYLNQSGITKFNTIIGGKFVNGENTKRKGI
NEYINLYSQQINDKTLKKYKMSVLFKQILSDTESKSFVIDKLEDDSDVVT
TMQSFYEQIAAFKTVEEKSIKETLSLLFDDLKAQKLDLSKIYFKNDKSLT
DLSQQVFDDYSVIGTAVLEYITQQIAPKNLDNPSKKEQELIAKKTEKAKY
LSLETIKLALEEFNKHRDIDKQCRFEEILANFAAIPMIFDEIAQNKDNLA
QISIKYQNQGKKDLLQASAEDDVKAIKDLLDQTNNLLHKLKIFHISQSED
KANILDKDEHFYLVFEECYFELANIVPLYNKIRNYITQKPYSDEKFKLNF
ENSTLANGWDKNKEPDNTAILFIKDDKYYLGVMNKKNNKIFDDKAIKENK
GEGYKKIVYKLLPGANKMLPKVFFSAKSIKFYNPSEDILRIRNHSTHTKN
GSPQKGYEKFEFNIEDCRKFIDFYKQSISKHPEWKDFGFRFSDTQRYNSI
DEFYREVENQGYKLTFENISESYIDSVVNQGKLYLFQIYNKDFSAYSKGR
PNLHTLYWKALFDERNLQDVVYKLNGEAELFYRKQSIPKKITHPAKEAIA
NKNKDNPKKESVFEYDLIKDKRFTEDKFFFHCPITINFKSSGANKFNDEI
NLLLKEKANDVHILSIARGERHLAYYTLVDGKGNIIKQDTFNIIGNDRMK
TNYHDKLAAIEKDRDSARKDWKKINNIKEMKEGYLSQVVHEIAKLVIEYN
AIVVFADLNFGFKRGRFKVEKQVYQKLEKMLIEKLNYLVFKDNEFDKTGG
VLRAYQLTAPFETFKKMGKQTGIIYYVPAGFTSKICPVTGFVNQLYPKYE
SVSKSQEFFSKFDKICYNLDKGYFEFSFDYKNFGDKAAKGKWTIASFGSR
LINFRNSDKNHNWDTREVYPTKELEKLLKDYSIEYGHGECIKAAICGESD
KKFFAKLTSVLNTILQMRNSKTGTELDYLISPVADVNGNFFDSRQAPKNM
PQDADANGAYHIGLKGLMLLGRIKNNQEGKKLNLVIKNEEYFEFVQNRNN

Francisella novicida Cpf1 D917A/D1255A (SEQ ID NO: 14) (A917, E1006, and A1255 are bolded and underlined)

(SEQ ID NO: 14)

MSIYQEFVNKYSLSKTLRFELIPQGKTLENIKARGLILDDEKRAKDYKKA
KQIIDKYHQFFIEEILSSVCISEDLLQNYSDVYFKLKKSDDDNLQKDFKS
AKDTIKKQISEYIKDSEKFKNLFNQNLIDAKKGQESDLILWLKQSKDNGI
ELFKANSDITDIDEALEIIKSFKGWTTYFKGFHENRKNVYSSNDIPTSII
YRIVDDNLPKFLENKAKYESLKDKAPEAINYEQIKKDLAEELTFDIDYKT
SEVNQRVFSLDEVFEIANFNNYLNQSGITKFNTIIGGKFVNGENTKRKGI
NEYINLYSQQINDKTLKKYKMSVLFKQILSDTESKSFVIDKLEDDSDVVT
TMQSFYEQIAAFKTVEEKSIKETLSLLFDDLKAQKLDLSKIYFKNDKSLT
DLSQQVFDDYSVIGTAVLEYITQQIAPKNLDNPSKKEQELIAKKTEKAKY
LSLETIKLALEEFNKHRDIDKQCRFEEILANFAAIPMIFDEIAQNKDNLA
QISIKYQNQGKKDLLQASAEDDVKAIKDLLDQTNNLLHKLKIFHISQSED
KANILDKDEHFYLVFEECYFELANIVPLYNKIRNYITQKPYSDEKFKLNF
ENSTLANGWDKNKEPDNTAILFIKDDKYYLGVMNKKNNKIFDDKAIKENK
GEGYKKIVYKLLPGANKMLPKVFFSAKSIKFYNPSEDILRIRNHSTHTKN
GSPQKGYEKFEFNIEDCRKFIDFYKQSISKHPEWKDFGFRFSDTQRYNSI
DEFYREVENQGYKLTFENISESYIDSVVNQGKLYLFQIYNKDFSAYSKGR
PNLHTLYWKALFDERNLQDVVYKLNGEAELFYRKQSIPKKITHPAKEAIA
NKNKDNPKKESVFEYDLIKDKRFTEDKFFFHCPITINFKSSGANKFNDEI
NLLLKEKANDVHILSIARGERHLAYYTLVDGKGNIIKQDTFNIIGNDRMK
TNYHDKLAAIEKDRDSARKDWKKINNIKEMKEGYLSQVVHEIAKLVIEYN
AIVVFEDLNFGFKRGRFKVEKQVYQKLEKMLIEKLNYLVFKDNEFDKTGG
VLRAYQLTAPFETFKKMGKQTGIIYYVPAGFTSKICPVTGFVNQLYPKYE
SVSKSQEFFSKFDKICYNLDKGYFEFSFDYKNFGDKAAKGKWTIASFGSR
LINFRNSDKNHNWDTREVYPTKELEKLLKDYSIEYGHGECIKAAICGESD
KKFFAKLTSVLNTILQMRNSKTGTELDYLISPVADVNGNFFDSRQAPKNM
PQDAAANGAYHIGLKGLMLLGRIKNNQEGKKLNLVIKNEEYFEFVQNRNN

Francisella novicida Cpf1 E1006A/D1255A (SEQ ID NO: 15) (D917, A1006, and A1255 are bolded and underlined)

(SEQ ID NO: 15)

MSIYQEFVNKYSLSKTLRFELIPQGKTLENIKARGLILDDEKRAKDYKKA
KQIIDKYHQFFIEEILSSVCISEDLLQNYSDVYFKLKKSDDDNLQKDFKS
AKDTIKKQISEYIKDSEKFKNLFNQNLIDAKKGQESDLILWLKQSKDNGI
ELFKANSDITDIDEALEIIKSFKGWTTYFKGFHENRKNVYSSNDIPTSII
YRIVDDNLPKFLENKAKYESLKDKAPEAINYEQIKKDLAEELTFDIDYKT
SEVNQRVFSLDEVFEIANFNNYLNQSGITKFNTIIGGKFVNGENTKRKGI
NEYINLYSQQINDKTLKKYKMSVLFKQILSDTESKSFVIDKLEDDSDVVT
TMQSFYEQIAAFKTVEEKSIKETLSLLFDDLKAQKLDLSKIYFKNDKSLT
DLSQQVFDDYSVIGTAVLEYITQQIAPKNLDNPSKKEQELIAKKTEKAKY
LSLETIKLALEEFNKHRDIDKQCRFEEILANFAAIPMIFDEIAQNKDNLA
QISIKYQNQGKKDLLQASAEDDVKAIKDLLDQTNNLLHKLKIFHISQSED
KANILDKDEHFYLVFEECYFELANIVPLYNKIRNYITQKPYSDEKFKLNF
ENSTLANGWDKNKEPDNTAILFIKDDKYYLGVMNKKNNKIFDDKAIKENK
GEGYKKIVYKLLPGANKMLPKVFFSAKSIKFYNPSEDILRIRNHSTHTKN
GSPQKGYEKFEFNIEDCRKFIDFYKQSISKHPEWKDFGFRFSDTQRYNSI
DEFYREVENQGYKLTFENISESYIDSVVNQGKLYLFQIYNKDFSAYSKGR
PNLHTLYWKALFDERNLQDVVYKLNGEAELFYRKQSIPKKITHPAKEAIA
NKNKDNPKKESVFEYDLIKDKRFTEDKFFFHCPITINFKSSGANKFNDEI
NLLLKEKANDVHILSIDRGERHLAYYTLVDGKGNIIKQDTFNIIGNDRMK
TNYHDKLAAIEKDRDSARKDWKKINNIKEMKEGYLSQVVHEIAKLVIEYN
AIVVFADLNFGFKRGRFKVEKQVYQKLEKMLIEKLNYLVFKDNEFDKTGG
VLRAYQLTAPFETFKKMGKQTGIIYYVPAGFTSKICPVTGFVNQLYPKYE
SVSKSQEFFSKFDKICYNLDKGYFEFSFDYKNFGDKAAKGKWTIASFGSR
LINFRNSDKNHNWDTREVYPTKELEKLLKDYSIEYGHGECIKAAICGESD
KKFFAKLTSVLNTILQMRNSKTGTELDYLISPVADVNGNFFDSRQAPKNM
PQDAAANGAYHIGLKGLMLLGRIKNNQEGKKLNLVIKNEEYFEFVQNRNN

Francisella novicida Cpf1 D917A/E1006A/D1255A (SEQ ID NO: 16) (A917, A1006, and A1255 are bolded and underlined)

(SEQ ID NO: 16)

MSIYQEFVNKYSLSKTLRFELIPQGKTLENIKARGLILDDEKRAKDYKKA
KQIIDKYHQFFIEEILSSVCISEDLLQNYSDVYFKLKKSDDDNLQKDFKS
AKDTIKKQISEYIKDSEKFKNLFNQNLIDAKKGQESDLILWLKQSKDNGI
ELFKANSDITDIDEALEIIKSFKGWTTYFKGFHENRKNVYSSNDIPTSII
YRIVDDNLPKFLENKAKYESLKDKAPEAINYEQIKKDLAEELTFDIDYKT
SEVNQRVFSLDEVFEIANFNNYLNQSGITKFNTIIGGKFVNGENTKRKGI
NEYINLYSQQINDKTLKKYKMSVLFKQILSDTESKSFVIDKLEDDSDVVT
TMQSFYEQIAAFKTVEEKSIKETLSLLFDDLKAQKLDLSKIYFKNDKSLT
DLSQQVFDDYSVIGTAVLEYITQQIAPKNLDNPSKKEQELIAKKTEKAKY
LSLETIKLALEEFNKHRDIDKQCRFEEILANFAAIPMIFDEIAQNKDNLA
QISIKYQNQGKKDLLQASAEDDVKAIKDLLDQTNNLLHKLKIFHISQSED
KANILDKDEHFYLVFEECYFELANIVPLYNKIRNYITQKPYSDEKFKLNF
ENSTLANGWDKNKEPDNTAILFIKDDKYYLGVMNKKNNKIFDDKAIKENK
GEGYKKIVYKLLPGANKMLPKVFFSAKSIKFYNPSEDILRIRNHSTHTKN
GSPQKGYEKFEFNIEDCRKFIDFYKQSISKHPEWKDFGFRFSDTQRYNSI
DEFYREVENQGYKLTFENISESYIDSVVNQGKLYLFQIYNKDFSAYSKGR
PNLHTLYWKALFDERNLQDVVYKLNGEAELFYRKQSIPKKITHPAKEAIA
NKNKDNPKKESVFEYDLIKDKRFTEDKFFFHCPITINFKSSGANKFNDEI
NLLLKEKANDVHILSIARGERHLAYYTLVDGKGNIIKQDTFNIIGNDRMK
TNYHDKLAAIEKDRDSARKDWKKINNIKEMKEGYLSQVVHEIAKLVIEYN
AIVVFADLNFGFKRGRFKVEKQVYQKLEKMLIEKLNYLVFKDNEFDKTGG
VLRAYQLTAPFETFKKMGKQTGIIYYVPAGFTSKICPVTGFVNQLYPKYE
SVSKSQEFFSKFDKICYNLDKGYFEFSFDYKNFGDKAAKGKWTIASFGSR
LINFRNSDKNHNWDTREVYPTKELEKLLKDYSIEYGHGECIKAAICGESD
KKFFAKLTSVLNTILQMRNSKTGTELDYLISPVADVNGNFFDSRQAPKNM
PQDAAANGAYHIGLKGLMLLGRIKNNQEGKKLNLVIKNEEYFEFVQNRNN

[0247] In some embodiments, the nucleic acid programmable DNA binding protein is a Cpf1 protein from an Acidaminococcus species (AsCpf1). Cpf1 proteins form Acidaminococcus species have been described previously and would be apparent to the skilled artisan. Exemplary Acidaminococcus Cpf1 proteins (AsCpf1) include, without limitation, any of the AsCpf1 proteins provided herin

[0248] Wild-type AsCpf1-Residue R912 is indicated in bold underlining and residues 661-667 are indicated in italics and underlining.

(SEQ ID NO: 17)
TQFEGFTNLYQVSKTLRFELIPQGKTLKHIQEQGFIEEDKARNDHYKELK
PIIDRIYKTYADQCLQLVQLDWENLSAAIDSYRKEKTEETRNALIEEQAT
YRNAIHDYFIGRTDNLTDAINKRHAEIYKGLFKAELFNGKVLKQLGTVTT
TEHENALLRSFDKFTTYFSGFYENRKNVFSAEDISTAIPHRIVQDNFPKF
KENCHIFTRLITAVPSLREHFENVKKAIGIFVSTSIEEVFSFPFYNQLLT
QTQIDLYNQLLGGISREAGTEKIKGLNEVLNLAIQKNDETAHIIASLPHR
FIPLFKQILSDRNTLSFILEEFKSDEEVIQSFCKYKTLLRNENVLETAEA
LFNELNSIDLTHIFISHKKLETISSALCDHWDTLRNALYERRISELTGKI
TKSAKEKVQRSLKHEDINLQEIISAAGKELSEAFKQKTSEILSHAHAALD
QPLPTTMLKKQEEKEILKSQLDSLLGLYHLLDWFAVDESNEVDPEFSARL
TGIKLEMEPSLSFYNKARNYATKKPYSVEKFKLNFQMPTLASGWDVNKEK
NNGAILFVKNGLYYLGIMPKQKGRYKALSFEPTEKTSEGFDKMYYDYFPD
AAKMIPKCSTQLKAVTAHFQTHTTPILLSNNFIEPLEITKEIYDLNNPEK
EPKKFQTAYAKKTGDQKGYREALCKWIDFTRDFLSKYTKTTSIDLSSLRP
SSQYKDLGEYYAELNPLLYHISFQRIAEKEIMDAVETGKLYLFQIYNKDF
AKGHHGKPNLHTLYWTGLFSPENLAKTSIKLNGQAELFYRPKSRMKRMAH
RLGEKMLNKKLKDQKTPIPDTLYQELYDYVNHRLSHDLSDEARALLPNVI
TKEVSHEIIKDRRFTSDKFFFHVPITLNYQAANSPSKFNQRVNAYLKEHP
ETPIIGIDRGERNLIYITVIDSTGKILEQRSLNTIQQFDYQKKLDNREKE
RVAARQAWSVVGTIKDLKQGYLSQVIHEIVDLMIHYQAVVVLENLNFGFK
SKRTGIAEKAVYQQFEKMLIDKLNCLVLKDYPAEKVGGVLNPYQLTDQFT
SFAKMGTQSGFLFYVPAPYTSKIDPLTGFVDPFVWKTIKNHESRKHFLEG
FDFLHYDVKTGDFILHFKMNRNLSFQRGLPGFMPAWDIVFEKNETQFDAK
GTPFIAGKRIVPVIENHRFTGRYRDLYPANELIALLEEKGIVFRDGSNIL
PKLLENDDSHAIDTMVALIRSVLQMRNSNAATGEDYINSPVRDLNGVCFD
SRFQNPEWPMDADANGAYHIALKGQLLLNHLKESKDLKLQNGISNQDWLA
YIQELRN

[0249] AsCpf1(R912A)-Residue A912 is indicated in bold underlining and residues 661-667 are indicated in italics and underlining.

(SEQ ID NO: 19)
TQFEGFTNLYQVSKTLRFELIPQGKTLKHIQEQGFIEEDKARNDHYKELK
PIIDRIYKTYADQCLQLVQLDWENLSAAIDSYRKEKTEETRNALIEEQAT
YRNAIHDYFIGRTDNLTDAINKRHAEIYKGLFKAELFNGKVLKQLGTVTT
TEHENALLRSFDKFTTYFSGFYENRKNVFSAEDISTAIPHRIVQDNFPKF
KENCHIFTRLITAVPSLREHFENVKKAIGIFVSTSIEEVFSFPFYNQLLT
QTQIDLYNQLLGGISREAGTEKIKGLNEVLNLAIQKNDETAHIIASLPHR
FIPLFKQILSDRNTLSFILEEFKSDEEVIQSFCKYKTLLRNENVLETAEA
LFNELNSIDLTHIFISHKKLETISSALCDHWDTLRNALYERRISELTGKI
TKSAKEKVQRSLKHEDINLQEIISAAGKELSEAFKQKTSEILSHAHAALD
QPLPTTMLKKQEEKEILKSQLDSLLGLYHLLDWFAVDESNEVDPEFSARL
TGIKLEMEPSLSFYNKARNYATKKPYSVEKFKLNFQMPTLASGWDVNKEK
NNGAILFVKNGLYYLGIMPKQKGRYKALSFEPTEKTSEGFDKMYYDYFPD
AAKMIPKCSTQLKAVTAHFQTHTTPILLSNNFIEPLEITKEIYDLNNPEK
EPKKFQTAYAKKTGDQKGYREALCKWIDFTRDFLSKYTKTTSIDLSSLRP
SSQYKDLGEYYAELNPLLYHISFQRIAEKEIMDAVETGKLYLFQIYNKDF
AKGHHGKPNLHTLYWTGLFSPENLAKTSIKLNGQAELFYRPKSRMKRMAH
RLGEKMLNKKLKDQKTPIPDTLYQELYDYVNHRLSHDLSDEARALLPNVI
TKEVSHEIIKDRRFTSDKFFFHVPITLNYQAANSPSKFNQRVNAYLKEHP
ETPIIGIDRGEANLIYITVIDSTGKILEQRSLNTIQQFDYQKKLDNREKE
RVAARQAWSVVGTIKDLKQGYLSQVIHEIVDLMIHYQAVVVLENLNFGFK
SKRTGIAEKAVYQQFEKMLIDKLNCLVLKDYPAEKVGGVLNPYQLTDQFT
SFAKMGTQSGFLFYVPAPYTSKIDPLTGFVDPFVWKTIKNHESRKHFLEG
FDFLHYDVKTGDFILHFKMNRNLSFQRGLPGFMPAWDIVFEKNETQFDAK
GTPFIAGKRIVPVIENHRFTGRYRDLYPANELIALLEEKGIVFRDGSNIL
PKLLENDDSHAIDTMVALIRSVLQMRNSNAATGEDYINSPVRDLNGVCFD
SRFQNPEWPMDADANGAYHIALKGQLLLNHLKESKDLKLQNGISNQDWLA
YIQELRN

[0250] In some embodiments, the nucleic acid programmable DNA binding protein is a Cpf1 protein from a Lachnospiraceae species (LbCpf1). Cpf1 proteins form Lachnospiraceae species have been described previously have been described previously and would be apparent to the skilled artisan. Exemplary Lachnospiraceae Cpf1 proteins (LbCpf1) include, without limitation, any of the LbCpf1 proteins provided herein.

[0251] In some embodiments, the LbCpf1 is a nickase. In some embodiments, the LbCpf1 nickase comprises an R836X mutant relative to SEQ ID NO: 18, wherein X is any amino acid except for R. In some embodiments, the LbCpf1 nickase comprises R836A mutant relative to SEQ ID NO: 18. In some embodiments, the LbCpf1 is a nuclease inactive LbCpf1 (dLbCpf1). In some embodiments, the dLbCpf1 comprises a D832X mutant relative to SEQ ID NO: 18, wherein X is any amino acid except for D. In some embodiments, the dLbCpf1 comprises a D832A mutant relative to SEQ ID NO: 18. Additional dCpf1 proteins have been described in the art, for example, in Li et al. “Base editing with a Cpf1-cytidine deaminase fusion” Nature Biotechnology; March 2018 DOI: 10.1038/nbt.4102; the entire contents of which are incorporated herein by reference. In some embodiments, the dCpf1 comprises 1, 2, or 3 of the point mutations D832A, E1006A, D1125A of the Cpf1 described in Li et al.

[0252] Wild-type LbCpf1-Residues R836 and R1138 is indicated in bold underlining.

(SEQ ID NO: 18)

MSKLEKFTNCYSLSKTLRFKAIPVGKTQENIDNKRLLVEDEKRAEDYKGV
KKLLDRYYLSFINDVLHSIKLKNLNNYISLFRKKTRTEKENKELENLEIN
LRKEIAKAFKGNEGYKSLFKKDIIETILPEFLDDKDEIALVNSFNGFTTA
FTGFFDNRENMFSEEAKSTSIAFRCINENLTRYISNMDIFEKVDAIFDKH
EVQEIKEKILNSDYDVEDFFEGEFFNFVLTQEGIDVYNAIIGGFVTESGE
KIKGLNEYINLYNQKTKQKLPKFKPLYKQVLSDRESLSFYGEGYTSDEEV
LEVFRNTLNKNSEIFSSIKKLEKLFKNFDEYSSAGIFVKNGPAISTISKD
IFGEWNVIRDKWNAEYDDIHLKKKAVVTEKYEDDRRKSFKKIGSFSLEQL
QEYADADLSVVEKLKEIIIQKVDEIYKVYGSSEKLFDADFVLEKSLKKND
AVVAIMKDLLDSVKSFENYIKAFFGEGKETNRDESFYGDFVLAYDILLKV
DHIYDAIRNYVTQKPYSKDKFKLYFQNPQFMGGWDKDKETDYRATILRYG
SKYYLAIMDKKYAKCLQKIDKDDVNGNYEKINYKLLPGPNKMLPKVFFSK
KWMAYYNPSEDIQKIYKNGTFKKGDMFNLNDCHKLIDFFKDSISRYPKWS
NAYDFNFSETEKYKDIAGFYREVEEQGYKVSFESASKKEVDKLVEEGKLY
MFQIYNKDFSDKSHGTPNLHTMYFKLLFDENNHGQIRLSGGAELFMRRAS
LKKEELVVHPANSPIANKNPDNPKKTTTLSYDVYKDKRFSEDQYELHIPI
AINKCPKNIFKINTEVRVLLKHDDNPYVIGIDRGERNLLYIVVVDGKGNI
VEQYSLNEIINNFNGIRIKTDYHSLLDKKEKERFEARQNWTSIENIKELK
AGYISQVVHKICELVEKYDAVIALEDLNSGFKNSRVKVEKQVYQKFEKML
IDKLNYMVDKKSNPCATGGALKGYQITNKFESFKSMSTQNGFIFYIPAWL
TSKIDPSTGFVNLLKTKYTSIADSKKFISSFDRIMYVPEEDLFEFALDYK
NFSRTDADYIKKWKLYSYGNRIRIFRNPKKNNVFDWEEVCLTSAYKELFN
KYGINYQQGDIRALLCEQSDKAFYSSFMALMSLMLQMRNSITGRTDVDFL
ISPVKNSDGIFYDSRNYEAQENAILPKNADANGAYNIARKVLWAIGQFKK
AEDEKLDKVKIAISNKEWLEYAQTSVKH

[0253] LbCpf1 (R836A)-Residue A836 is indicated in bold underlining.

(SEQ ID NO: 20)

MSKLEKFTNCYSLSKTLRFKAIPVGKTQENIDNKRLLVEDEKRAEDYKGV
KKLLDRYYLSFINDVLHSIKLKNLNNYISLFRKKTRTEKENKELENLEIN
LRKEIAKAFKGNEGYKSLFKKDIIETILPEFLDDKDEIALVNSFNGFTTA
FTGFFDNRENMFSEEAKSTSIAFRCINENLTRYISNMDIFEKVDAIFDKH
EVQEIKEKILNSDYDVEDFFEGEFFNFVLTQEGIDVYNAIIGGFVTESGE
KIKGLNEYINLYNQKTKQKLPKFKPLYKQVLSDRESLSFYGEGYTSDEEV
LEVFRNTLNKNSEIFSSIKKLEKLFKNFDEYSSAGIFVKNGPAISTISKD
IFGEWNVIRDKWNAEYDDIHLKKKAVVTEKYEDDRRKSFKKIGSFSLEQL
QEYADADLSVVEKLKEIIIQKVDEIYKVYGSSEKLFDADFVLEKSLKKND
AVVAIMKDLLDSVKSFENYIKAFFGEGKETNRDESFYGDFVLAYDILLKV
DHIYDAIRNYVTQKPYSKDKFKLYFQNPQFMGGWDKDKETDYRATILRYG
SKYYLAIMDKKYAKCLQKIDKDDVNGNYEKINYKLLPGPNKMLPKVFFSK
KWMAYYNPSEDIQKIYKNGTFKKGDMFNLNDCHKLIDFFKDSISRYPKWS
NAYDFNFSETEKYKDIAGFYREVEEQGYKVSFESASKKEVDKLVEEGKLY
MFQIYNKDFSDKSHGTPNLHTMYFKLLFDENNHGQIRLSGGAELFMRRAS
LKKEELVVHPANSPIANKNPDNPKKTTTLSYDVYKDKRFSEDQYELHIPI
AINKCPKNIFKINTEVRVLLKHDDNPYVIGIDRGEANLLYIVVVDGKGNI
VEQYSLNEIINNFNGIRIKTDYHSLLDKKEKERFEARQNWTSIENIKELK
AGYISQVVHKICELVEKYDAVIALEDLNSGFKNSRVKVEKQVYQKFEKML
IDKLNYMVDKKSNPCATGGALKGYQITNKFESFKSMSTQNGFIFYIPAWL
TSKIDPSTGFVNLLKTKYTSIADSKKFISSFDRIMYVPEEDLFEFALDYK
NFSRTDADYIKKWKLYSYGNRIRIFRNPKKNNVFDWEEVCLTSAYKELFN
KYGINYQQGDIRALLCEQSDKAFYSSFMALMSLMLQMRNSITGRTDVDFL
ISPVKNSDGIFYDSRNYEAQENAILPKNADANGAYNIARKVLWAIGQFKK
AEDEKLDKVKIAISNKEWLEYAQTSVKH

[0254] LbCpf1 (R1138A)-Residue A1138 is indicated in bold underlining.

(SEQ ID NO: 21)

MSKLEKFTNCYSLSKTLRFKAIPVGKTQENIDNKRLLVEDEKRAEDYKGV
KKLLDRYYLSFINDVLHSIKLKNLNNYISLFRKKTRTEKENKELENLEIN
LRKEIAKAFKGNEGYKSLFKKDIIETILPEFLDDKDEIALVNSFNGFTTA
FTGFFDNRENMFSEEAKSTSIAFRCINENLTRYISNMDIFEKVDAIFDKH
EVQEIKEKILNSDYDVEDFFEGEFFNFVLTQEGIDVYNAIIGGFVTESGE
KIKGLNEYINLYNQKTKQKLPKFKPLYKQVLSDRESLSFYGEGYTSDEEV
LEVFRNTLNKNSEIFSSIKKLEKLFKNFDEYSSAGIFVKNGPAISTISKD
IFGEWNVIRDKWNAEYDDIHLKKKAVVTEKYEDDRRKSFKKIGSFSLEQL
QEYADADLSVVEKLKEIIIQKVDEIYKVYGSSEKLFDADFVLEKSLKKND
AVVAIMKDLLDSVKSFENYIKAFFGEGKETNRDESFYGDFVLAYDILLKV
DHIYDAIRNYVTQKPYSKDKFKLYFQNPQFMGGWDKDKETDYRATILRYG
SKYYLAIMDKKYAKCLQKIDKDDVNGNYEKINYKLLPGPNKMLPKVFFSK
KWMAYYNPSEDIQKIYKNGTFKKGDMFNLNDCHKLIDFFKDSISRYPKWS
NAYDFNFSETEKYKDIAGFYREVEEQGYKVSFESASKKEVDKLVEEGKLY
MFQIYNKDFSDKSHGTPNLHTMYFKLLFDENNHGQIRLSGGAELFMRRAS
LKKEELVVHPANSPIANKNPDNPKKTTTLSYDVYKDKRFSEDQYELHIPI
AINKCPKNIFKINTEVRVLLKHDDNPYVIGIDRGERNLLYIVVVDGKGNI
VEQYSLNEIINNFNGIRIKTDYHSLLDKKEKERFEARQNWTSIENIKELK
AGYISQVVHKICELVEKYDAVIALEDLNSGFKNSRVKVEKQVYQKFEKML
IDKLNYMVDKKSNPCATGGALKGYQITNKFESFKSMSTQNGFIFYIPAWL
TSKIDPSTGFVNLLKTKYTSIADSKKFISSFDRIMYVPEEDLFEFALDYK
NFSRTDADYIKKWKLYSYGNRIRIFRNPKKNNVFDWEEVCLTSAYKELFN
KYGINYQQGDIRALLCEQSDKAFYSSFMALMSLMLQMANSITGRTDVDFL
ISPVKNSDGIFYDSRNYEAQENAILPKNADANGAYNIARKVLWAIGQFKK
AEDEKLDKVKIAISNKEWLEYAQTSVKH

[0255] In some embodiments, the Cpf1 protein is a crippled Cpf1 protein. As used herein a “crippled Cpf1” protein is a Cpf1 protein having diminished nuclease activity as compared to a wild-type Cpf1 protein. In some embodiments, the crippled Cpf1 protein preferentially cuts the target strand more efficiently than the non-target strand. For example, the Cpf1 protein preferentially cuts the strand of a duplexed nucleic acid molecule in which a nucleotide to be edited resides. In some embodiments, the crippled Cpf1 protein preferentially cuts the non-target strand more efficiently than the target strand. For example, the Cpf1 protein preferentially cuts the strand of a duplexed nucleic acid molecule in which a nucleotide to be edited does not reside. In some embodiments, the crippled Cpf1 protein preferentially cuts the target strand at least 5% more efficiently than it cuts the non-target strand. In some embodiments, the crippled Cpf1 protein preferentially cuts the target strand at least 5%, 10%, 15%, 20%, 25%, 30%, 35%, 40%, 50%, 60%, 70%, 80%, 90%, or at least 100% more efficiently than it cuts the non-target strand.

[0256] In some embodiments, a crippled Cpf1 protein is a non-naturally occurring Cpf1 protein. In some embodiments, the crippled Cpf1 protein comprises one or more mutations relative to a wild-type Cpf1 protein. In some embodiments, the crippled Cpf1 protein comprises 1, 2, 3, 4, 5, 6, 7, 8, 9, 10, 11, 12, 13, 14, 15, 16, 17, 18, 19, or 20 mutations relative to a wild-type Cpf1 protein. In some embodiments, the crippled Cpf1 protein comprises an R836A mutation mutation as set forth in SEQ ID NO: 18, or in a corresponding amino acid in another Cpf1 protein. It should be appreciated that a Cpf1 comprising a homologous residue (e.g., a corresponding amino acid) to R836A of SEQ ID NO: 18 could also be mutated to achieve similar results. In some embodiments, the crippled Cpf1 protein comprises a R1138A mutation as set forth in SEQ ID NO: 18, or in a corresponding amino acid in another Cpf1 protein. In some embodiments, the crippled Cpf1 protein comprises an R912A mutation mutation as set forth in SEQ ID NO: 17, or in a corresponding amino acid in another Cpf1 protein. Without wishing to be bound by any particular theory, residue R836 of SEQ ID NO: 18 (LbCpf1) and residue R912 of SEQ ID NO: 17 (AsCpf1) are examples of corresponding (e.g., homologous) residues. For example, a portion of the alignment between SEQ ID NO: 17 and 18 shows that R912 and R836 are corresponding residues.

| | |
|---|---|
| AsCpf1 | YQAANSPSKFNQRVNAYLKEHPETPIIGIDRGERNLIYITVIDSTGKILEQRSLNTIQ-- |
| LbCpf1 | KCPKN-IFKINTEVRVLLKHDDNPYVIGIDRGERNLLYIVVVDGKGNIVEQYSLNEIINN |
| | * *:* .*.. **.. : :**********:**.*:*..*:*:** *** * |

[0257] In some embodiments, any of the Cpf1 proteins provided herein comprises one or more amino acid deletions. In some embodiments, any of the Cpf1 proteins provided herein comprises 1, 2, 3, 4, 5, 6, 7, 8, 9, 10, 11, 12, 13, 14, 15, 16, 17, 18, 19, or 20 amino acid deletions. Without wishing to be bound by any particular theory, there is a helical region in Cpf1, which includes residues 661-667 of AsCpf1 (SEQ ID NO: 17), that may obstruct the function of a deaminase (e.g., APOBEC) that is fused to the Cpf1. This region comprises the amino acid sequence KKTGDQK. Accordingly, aspects of the disclosure provide Cpf1 proteins comprising mutations (e.g., deletions) that disrupt this helical region in Cpf1. In some embodiments, the Cpf1 protein comprises one or more deletions of the following residues in SEQ ID NO: 17, or one or more corresponding deletions in another Cpf1 protein: K661, K662, T663, G664, D665, Q666, and K667. In some embodiments, the Cpf1 protein comprises a T663 and a D665 deletion in SEQ ID NO: 17, or corresponding deletions in another Cpf1 protein. In some embodiments, the Cpf1 protein comprises a K662, T663, D665, and Q666 deletion in SEQ ID NO: 17, or corresponding deletions in another Cpf1 protein. In some embodiments, the Cpf1 protein comprises a K661, K662, T663, D665, Q666 and K667 deletion in SEQ ID NO: 17, or corresponding deletions in another Cpf1 protein.

[0258] AsCpf1 (deleted T663 and D665)

(SEQ ID NO: 22)

TQFEGFTNLYQVSKTLRFELIPQGKTLKHIQEQGFIEEDKARNDHYKELK
PIIDRIYKTYADQCLQLVQLDWENLSAAIDSYRKEKTEETRNALIEEQAT
YRNAIHDYFIGRTDNLTDAINKRHAEIYKGLFKAELFNGKVLKQLGTVTT
TEHENALLRSFDKFTTYFSGFYENRKNVFSAEDISTAIPHRIVQDNFPKF
KENCHIFTRLITAVPSLREHFENVKKAIGIFVSTSIEEVFSFPFYNQLLT
QTQIDLYNQLLGGISREAGTEKIKGLNEVLNLAIQKNDETAHIIASLPHR
FIPLFKQILSDRNTLSFILEEFKSDEEVIQSFCKYKTLLRNENVLETAEA
LFNELNSIDLTHIFISHKKLETISSALCDHWDTLRNALYERRISELTGKI
TKSAKEKVQRSLKHEDINLQEIISAAGKELSEAFKQKTSEILSHAHAALD
QPLPTTMLKKQEEKEILKSQLDSLLGLYHLLDWFAVDESNEVDPEFSARL
TGIKLEMEPSLSFYNKARNYATKKPYSVEKFKLNFQMPTLASGWDVNKEK
NNGAILFVKNGLYYLGIMPKQKGRYKALSFEPTEKTSEGFDKMYYDYFPD
AAKMIPKCSTQLKAVTAHFQTHTTPILLSNNFIEPLEITKEIYDLNNPEK
EPKKFQTAYAKKGQKGYREALCKWIDFTRDFLSKYTKTTSIDLSSLRPSS
QYKDLGEYYAELNPLLYHISFQRIAEKEIMDAVETGKLYLFQIYNKDFAK
GHHGKPNLHTLYWTGLFSPENLAKTSIKLNGQAELFYRPKSRMKRMAHRL
GEKMLNKKLKDQKTPIPDTLYQELYDYVNHRLSHDLSDEARALLPNVITK
EVSHEIIKDRRFTSDKFFFHVPITLNYQAANSPSKFNQRVNAYLKEHPET
PIIGIDRGERNLIYITVIDSTGKILEQRSLNTIQQFDYQKKLDNREKERV
AARQAWSVVGTIKDLKQGYLSQVIHEIVDLMIHYQAVVVLENLNFGFKSK
RTGIAEKAVYQQFEKMLIDKLNCLVLKDYPAEKVGGVLNPYQLTDQFTSF
AKMGTQSGFLFYVPAPYTSKIDPLTGFVDPFVWKTIKNHESRKHFLEGFD
FLHYDVKTGDFILHFKMNRNLSFQRGLPGFMPAWDIVFEKNETQFDAKGT
PFIAGKRIVPVIENHRFTGRYRDLYPANELIALLEEKGIVFRDGSNILPK
LLENDDSHAIDTMVALIRSVLQMRNSNAATGEDYINSPVRDLNGVCFDSR
FQNPEWPMDADANGAYHIALKGQLLLNHLKESKDLKLQNGISNQDWLAYI
QELRN

[0259] AsCpf1 (deleted K662, T663, D665, and Q666)

(SEQ ID NO: 23)

TQFEGFTNLYQVSKTLRFELIPQGKTLKHIQEQGFIEEDKARNDHYKELK
PIIDRIYKTYADQCLQLVQLDWENLSAAIDSYRKEKTEETRNALIEEQAT
YRNAIHDYFIGRTDNLTDAINKRHAEIYKGLFKAELFNGKVLKQLGTVTT
TEHENALLRSFDKFTTYFSGFYENRKNVFSAEDISTAIPHRIVQDNFPKF
KENCHIFTRLITAVPSLREHFENVKKAIGIFVSTSIEEVFSFPFYNQLLT
QTQIDLYNQLLGGISREAGTEKIKGLNEVLNLAIQKNDETAHIIASLPHR
FIPLFKQILSDRNTLSFILEEFKSDEEVIQSFCKYKTLLRNENVLETAEA
LFNELNSIDLTHIFISHKKLETISSALCDHWDTLRNALYERRISELTGKI
TKSAKEKVQRSLKHEDINLQEIISAAGKELSEAFKQKTSEILSHAHAALD
QPLPTTMLKKQEEKEILKSQLDSLLGLYHLLDWFAVDESNEVDPEFSARL
TGIKLEMEPSLSFYNKARNYATKKPYSVEKFKLNFQMPTLASGWDVNKEK
NNGAILFVKNGLYYLGIMPKQKGRYKALSFEPTEKTSEGFDKMYYDYFPD
AAKMIPKCSTQLKAVTAHFQTHTTPILLSNNFIEPLEITKEIYDLNNPEK
EPKKFQTAYAKGKGYREALCKWIDFTRDFLSKYTKTTSIDLSSLRPSSQY
KDLGEYYAELNPLLYHISFQRIAEKEIMDAVETGKLYLFQIYNKDFAKGH
HGKPNLHTLYWTGLFSPENLAKTSIKLNGQAELFYRPKSRMKRMAHRLGE
KMLNKKLKDQKTPIPDTLYQELYDYVNHRLSHDLSDEARALLPNVITKEV
SHEIIKDRRFTSDKFFFHVPITLNYQAANSPSKFNQRVNAYLKEHPETPI
IGIDRGERNLIYITVIDSTGKILEQRSLNTIQQFDYQKKLDNREKERVAA
RQAWSVVGTIKDLKQGYLSQVIHEIVDLMIHYQAVVVLENLNFGFKSKRT
GIAEKAVYQQFEKMLIDKLNCLVLKDYPAEKVGGVLNPYQLTDQFTSFAK
MGTQSGFLFYVPAPYTSKIDPLTGFVDPFVWKTIKNHESRKHFLEGFDFL
HYDVKTGDFILHFKMNRNLSFQRGLPGFMPAWDIVFEKNETQFDAKGTPF
IAGKRIVPVIENHRFTGRYRDLYPANELIALLEEKGIVFRDGSNILPKLL
ENDDSHAIDTMVALIRSVLQMRNSNAATGEDYINSPVRDLNGVCFDSRFQ
NPEWPMDADANGAYHIALKGQLLLNHLKESKDLKLQNGISNQDWLAYIQE
LRN

[0260] AsCpf1 (deleted K661, K662, T663, D665, Q666, and K667)

(SEQ ID NO: 24)

TQFEGFTNLYQVSKTLRFELIPQGKTLKHIQEQGFIEEDKARNDHYKELK
PIIDRIYKTYADQCLQLVQLDWENLSAAIDSYRKEKTEETRNALIEEQAT
YRNAIHDYFIGRTDNLTDAINKRHAEIYKGLFKAELFNGKVLKQLGTVTT
TEHENALLRSFDKFTTYFSGFYENRKNVFSAEDISTAIPHRIVQDNFPKF
KENCHIFTRLITAVPSLREHFENVKKAIGIFVSTSIEEVFSFPFYNQLLT
QTQIDLYNQLLGGISREAGTEKIKGLNEVLNLAIQKNDETAHIIASLPHR
FIPLFKQILSDRNTLSFILEEFKSDEEVIQSFCKYKTLLRNENVLETAEA
LFNELNSIDLTHIFISHKKLETISSALCDHWDTLRNALYERRISELTGKI
TKSAKEKVQRSLKHEDINLQEIISAAGKELSEAFKQKTSEILSHAHAALD
QPLPTTMLKKQEEKEILKSQLDSLLGLYHLLDWFAVDESNEVDPEFSARL
TGIKLEMEPSLSFYNKARNYATKKPYSVEKFKLNFQMPTLASGWDVNKEK
NNGAILFVKNGLYYLGIMPKQKGRYKALSFEPTEKTSEGFDKMYYDYFPD
AAKMIPKCSTQLKAVTAHFQTHTTPILLSNNFIEPLEITKEIYDLNNPEK
EPKKFQTAYAGGYREALCKWIDFTRDFLSKYTKTTSIDLSSLRPSSQYKD
LGEYYAELNPLLYHISFQRIAEKEIMDAVETGKLYLFQIYNKDFAKGHHG
KPNLHTLYWTGLFSPENLAKTSIKLNGQAELFYRPKSRMKRMAHRLGEKM
LNKKLKDQKTPIPDTLYQELYDYVNHRLSHDLSDEARALLPNVITKEVSH
EIIKDRRFTSDKFFFHVPITLNYQAANSPSKFNQRVNAYLKEHPETPIIG
IDRGERNLIYITVIDSTGKILEQRSLNTIQQFDYQKKLDNREKERVAARQ
AWSVVGTIKDLKQGYLSQVIHEIVDLMIHYQAVVVLENLNFGFKSKRTGI
AEKAVYQQFEKMLIDKLNCLVLKDYPAEKVGGVLNPYQLTDQFTSFAKMG
TQSGFLFYVPAPYTSKIDPLTGFVDPFVWKTIKNHESRKHFLEGFDFLHY
DVKTGDFILHFKMNRNLSFQRGLPGFMPAWDIVFEKNETQFDAKGTPFIA
GKRIVPVIENHRFTGRYRDLYPANELIALLEEKGIVFRDGSNILPKLLEN
DDSHAIDTMVALIRSVLQMRNSNAATGEDYINSPVRDLNGVCFDSRFQNP
EWPMDADANGAYHIALKGQLLLNHLKESKDLKLQNGISNQDWLAYIQELR
N

[0261] In some embodiments, the nucleic acid programmable DNA binding protein (napDNAbp) is a nucleic acid programmable DNA binding protein that does not require a canonical (NGG) PAM sequence in the target sequence. In some embodiments, the napDNAbp is an Argonaute protein. One example of such a nucleic acid programmable DNA binding protein is an Argonaute protein from Natronobacterium gregoryi (NgAgo). NgAgo is a ssDNA-guided endonuclease. NgAgo binds 5′-phosphorylated ssDNA of ˜24 nucleotides (gDNA) in length to guide it to a target site and makes DNA double-strand breaks at the gDNA site. In contrast to Cas9, the NgAgo-gDNA system does not require a protospacer-adjacent motif (PAM). Using a nuclease inactive NgAgo (dNgAgo) can greatly expand the bases that may be targeted. The characterization and use of NgAgo have been described in Gao et al., Nat. Biotechnol., 2016 July; 34(7):768-73. PubMed PMID: 27136078; Swarts et al., Nature 507(7491) (2014):258-61; and Swarts et al., Nucleic Acids Res. 43(10) (2015):5120-9, each of which is incorporated herein by reference. The sequence of Natronobacterium gregoryi Argonaute is provided in SEQ ID NO: 25.

[0262] In some embodiments, the napDNAbp is an Argonaute protein. In some embodiments, the napDNAbp comprises an amino acid sequence that is at least 85%, at least 90%, at least 91%, at least 92%, at least 93%, at least 94%, at least 95%, at least 96%, at least 97%, at least 98%, at least 99%, or at least 99.5% identical to a naturally-occurring Argonaute protein. In some embodiments, the napDNAbp is a naturally-occurring Argonaute protein. In some embodiments, the napDNAbp comprises an amino acid sequence that is at least 85%, at least 90%, at least 91%, at least 92%, at least 93%, at least 94%, at least 95%, at least 96%, at least 97%, at least 98%, at least 99%, or at least 99.5% identical to any one of SEQ ID NO: 25. In some embodiments, the napDNAbp comprises an amino acid sequence of any one SEQ ID NO: 25.

[0263] Wild type Natronobacterium gregoryi Argonaute (SEQ ID NO: 25)

(SEQ ID NO: 25)

MTVIDLDSTTTADELTSGHTYDISVTLTGVYDNTDEQHPRMSLAFEQDNG
ERRYITLWKNTTPKDVFTYDYATGSTYIFTNIDYEVKDGYENLTATYQTT
VENATAQEVGTTDEDETFAGGEPLDHHLDDALNETPDDAETESDSGHVMT
SFASRDQLPEWTLHTYTLTATDGAKTDTEYARRTLAYTVRQELYTDHDAA
PVATDGLMLLTPEPLGETPLDLDCGVRVEADETRTLDYTTAKDRLLAREL
VEEGLKRSLWDDYLVRGIDEVLSKEPVLTCDEFDLHERYDLSVEVGHSGR
AYLHINFRHRFVPKLTLADIDDDNIYPGLRVKTTYRPRRGHIVWGLRDEC
ATDSLNTLGNQSVVAYHRNNQTPINTDLLDAIEAADRRVVETRRQGHGDD
AVSFPQELLAVEPNTHQIKQFASDGFHQQARSKTRLSASRCSEKAQAFAE
RLDPVRLNGSTVEFSSEFFTGNNEQQLRLLYENGESVLTFRDGARGAHPD
ETFSKGIVNPPESFEVAVVLPEQQADTCKAQWDTMADLLNQAGAPPTRSE
TVQYDAFSSPESISLNVAGAIDPSEVDAAFVVLPPDQEGFADLASPTETY
DELKKALANMGIYSQMAYFDRFRDAKIFYTRNVALGLLAAAGGVAFTTEH
AMPGDADMFIGIDVSRSYPEDGASGQINIAATATAVYKDGTILGHSSTRP
QLGEKLQSTDVRDIMKNAILGYQQVTGESPTHIVIHRDGFMNEDLDPATE
FLNEQGVEYDIVEIRKQPQTRLLAVSDVQYDTPVKSIAAINQNEPRATVA
TFGAPEYLATRDGGGLPRPIQIERVAGETDIETLTRQVYLLSQSHIQVHN
STARLPITTAYADQASTHATKGYLVQTGAFESNVGFL

[0264] In some embodiments, the napDNAbp is a prokaryotic homolog of an Argonaute protein. Prokaryotic homologs of Argonaute proteins are known and have been described, for example, in Makarova K., et al., “Prokaryotic homologs of Argonaute proteins are predicted to function as key components of a novel system of defense against mobile genetic elements”, Biol. Direct. 2009 Aug. 25; 4:29. doi: 10.1186/1745-6150-4-29, is incorporated herein by reference. In some embodiments, the napDNAbp is a Marinitoga piezophila Argunaute (MpAgo) protein. The CRISPR-associated Marinitoga piezophila Argonaute (MpAgo) protein cleaves single-stranded target sequences using 5′-phosphorylated guides. The 5′ guides are used by all known Argonautes. The crystal structure of an MpAgo-RNA complex shows a guide strand binding site comprising residues that block 5′ phosphate interactions. This data suggests the evolution of an Argonaute subclass with noncanonical specificity for a 5′-hydroxylated guide. See, e.g., Kaya et al., “A bacterial Argonaute with noncanonical guide RNA specificity”, Proc Natl Acad Sci USA. 2016 Apr. 12; 113(15):4057-62, the entire contents of which are hereby incorporated by reference). It should be appreciated that other Argonaute proteins may be used in any of the fusion proteins (e.g., base editors) described herein, for example, to guide a deaminase (e.g., cytidine deaminase) to a target nucleic acid (e.g., ssRNA).

[0265] In some embodiments, the nucleic acid programmable DNA binding protein (napDNAbp) is a single effector of a microbial CRISPR-Cas system. Single effectors of microbial CRISPR-Cas systems include, without limitation, Cas9, Cpf1, C2c1, C2c2, and C2c3. Typically, microbial CRISPR-Cas systems are divided into Class 1 and Class 2 systems. Class 1 systems have multisubunit effector complexes, while Class 2 systems have a single protein effector. Cas9 and Cpf1 are Class 2 effectors. In addition to Cas9 and Cpf1, three distinct Class 2 CRISPR-Cas systems (C2c1, C2c2, and C2c3) have been described by Shmakov et al., “Discovery and Functional Characterization of Diverse Class 2 CRISPR Cas Systems”, Mol. Cell, 2015 Nov. 5; 60(3): 385-397, the entire contents of which are herein incorporated by reference. Effectors of two of the systems, C2c1 and C2c3, contain RuvC-like endonuclease domains related to Cpf1. A third system, C2c2 contains an effector with two predicted HEPN RNase domains. Production of mature CRISPR RNA is tracrRNA-independent, unlike production of CRISPR RNA by C2c1. C2c1 depends on both CRISPR RNA and tracrRNA for DNA cleavage. Bacterial C2c2 has been shown to possess a unique RNase activity for CRISPR RNA maturation distinct from its RNA-activated single-stranded RNA degradation activity. These RNase functions are different from each other and from the CRISPR RNA-processing behavior of Cpf1. See, e.g., East-Seletsky, et al., “Two distinct RNase activities of CRISPR-C2c2 enable guide-RNA processing and RNA detection”, Nature, 2016 Oct. 13; 538(7624):270-273, the entire contents of which are hereby incorporated by reference. In vitro biochemical analysis of C2c2 in Leptotrichia shahii has shown that C2c2 is guided by a single CRISPR RNA and can be programmed to cleave ssRNA targets carrying complementary protospacers. Catalytic residues in the two conserved HEPN domains mediate cleavage. Mutations in the catalytic residues generate catalytically inactive RNA-binding proteins. See e.g., Abudayyeh et al., “C2c2 is a single-component programmable RNA-guided RNA-targeting CRISPR effector,” Science, 2016 Aug. 5; 353(6299), the entire contents of which are hereby incorporated by reference.

[0266] The crystal structure of Alicyclobaccillus acidoterrastris C2c1 (AacC2c1) has been reported in complex with a chimeric single-molecule guide RNA (sgRNA). See, e.g., Liu et al., “C2c1-sgRNA Complex Structure Reveals RNA-Guided DNA Cleavage Mechanism”, Mol. Cell, 2017 Jan. 19; 65(2):310-322, incorporated herein by reference. The crystal structure has also been reported for Alicyclobacillus acidoterrestris C2c1 bound to target DNAs as ternary complexes. See, e.g., Yang et al., “PAM-dependent Target DNA Recognition and Cleavage by C2C1 CRISPR-Cas endonuclease”, Cell, 2016 Dec. 15; 167(7):1814-1828, the entire contents of which are hereby incorporated by reference. Catalytically competent conformations of AacC2c1, both with target and non-target DNA strands, have been captured independently positioned within a single RuvC catalytic pocket, with C2c1-mediated cleavage resulting in a staggered seven-nucleotide break of target DNA. Structural comparisons between C2c1 ternary complexes and previously identified Cas9 and Cpf1 counterparts demonstrate the diversity of mechanisms used by CRISPR-Cas9 systems.

[0267] In some embodiments, the nucleic acid programmable DNA binding protein (napDNAbp) of any of the fusion proteins provided herein is a C2c1, a C2c2, or a C2c3 protein. In some embodiments, the napDNAbp is a C2c1 protein. In some embodiments, the napDNAbp is a C2c2 protein. In some embodiments, the napDNAbp is a C2c3 protein. In some embodiments, the napDNAbp comprises an amino acid sequence that is at least 85%, at least 90%, at least 91%, at least 92%, at least 93%, at least 94%, at least 95%, at least 96%, at least 97%, at least 98%, at least 99%, or at least 99.5% identical to a naturally-occurring C2c1, C2c2, or C2c3 protein. In some embodiments, the napDNAbp is a naturally-occurring C2c1, C2c2, or C2c3 protein. In some embodiments, the napDNAbp comprises an amino acid sequence that is at least 85%, at least 90%, at least 91%, at least 92%, at least 93%, at least 94%, at least 95%, at least 96%, at least 97%, at least 98%, at least 99%, or at least 99.5% identical to any one of SEQ ID NOs: 26-28. In some embodiments, the napDNAbp comprises an amino acid sequence of any one SEQ ID NOs: 26-28. It should be appreciated that C2c1, C2c2, or C2c3 from other bacterial species may also be used in accordance with the present disclosure.

C2c1 (uniprot.org/uniprot/TOD7A2#)
spIT0D7A2|C2C1_ALIAG CRISPR-associated endonuclease C2c1 OS=Alicyclobacillus acidoterrestris (strain ATCC 49025/DSM 3922/CIP 106132/NCIMB 13137/GD3B) GN=c2c1 PE=1 SV=1

(SEQ ID NO: 26)

MAVKSIKVKLRLDDMPEIRAGLWKLHKEVNAGVRYYTEWLSLLRQENLYR
RSPNGDGEQECDKTAEECKAELLERLRARQVENGHRGPAGSDDELLQLAR
QLYELLVPQAIGAKGDAQQIARKFLSPLADKDAVGGLGIAKAGNKPRWVR
MREAGEPGWEEEKEKAETRKSADRTADVLRALADFGLKPLMRVYTDSEMS
SVEWKPLRKGQAVRTWDRDMFQQAIERMMSWESWNQRVGQEYAKLVEQKN
RFEQKNFVGQEHLVHLVNQLQQDMKEASPGLESKEQTAHYVTGRALRGSD
KVFEKWGKLAPDAPFDLYDAEIKNVQRRNTRRFGSHDLFAKLAEPEYQAL
WREDASFLTRYAVYNSILRKLNHAKMFATFTLPDATAHPIWTRFDKLGGN
LHQYTFLFNEFGERRHAIRFHKLLKVENGVAREVDDVTVPISMSEQLDNL
LPRDPNEPIALYFRDYGAEQHFTGEFGGAKIQCRRDQLAHMHRRRGARDV
YLNVSVRVQSQSEARGERRPPYAAVFRLVGDNHRAFVHFDKLSDYLAEHP
DDGKLGSEGLLSGLRVMSVDLGLRTSASISVFRVARKDELKPNSKGRVPF
FFPIKGNDNLVAVHERSQLLKLPGETESKDLRAIREERQRTLRQLRTQLA
YLRLLVRCGSEDVGRRERSWAKLIEQPVDAANHMTPDWREAFENELQKLK
SLHGICSDKEWMDAVYESVRRVWRHMGKQVRDWRKDVRSGERPKIRGYAK
DVVGGNSIEQIEYLERQYKFLKSWSFFGKVSGQVIRAEKGSRFAITLREH
IDHAKEDRLKKLADRIIMEALGYVYALDERGKGKWVAKYPPCQLILLEEL
SEYQFNNDRPPSENNQLMQWSHRGVFQELINQAQVHDLLVGTMYAAFSSR
FDARTGAPGIRCRRVPARCTQEHNPEPFPWWLNKFVVEHTLDACPLRADD
LIPTGEGEIFVSPFSAEEGDFHQIHADLNAAQNLQQRLWSDFDISQIRLR
CDWGEVDGELVLIPRLTGKRTADSYSNKVFYTNTGVTYYERERGKKRRKV
FAQEKLSEEEAELLVEADEAREKSVVLMRDPSGIINRGNWTRQKEFWSMV
NQRIEGYLVKQIRSRVPLQDSACENTGDI

C2c2 (uniprot.org/uniprot/PODOC6)
>spIP0DOC6|C2C2 LEPSD CRISPR-associated endoribonuclease C2c2 OS=Leptotrichia shahii (strain DSM 19757/CCUG 47503/CIP 107916/JCM 16776/LB37) GN=c2c2 PE=1 SV=1

(SEQ ID NO: 27)

MGNLFGHKRWYEVRDKKDFKIKRKVKVKRNYDGNKYILNINENNNKEKID
NNKFIRKYINYKKNDNILKEFTRKFHAGNILFKLKGKEGIIRIENNDDFL
ETEEVVLYIEAYGKSEKLKALGITKKKIIDEAIRQGITKDDKKIEIKRQE
NEEEIEIDIRDEYTNKTLNDCSIILRIIENDELETKKSIYEIFKNINMSL
YKIIEKIIENETEKVFENRYYEEHLREKLLKDDKIDVILTNFMEIREKIK
SNLEILGFVKFYLNVGGDKKKSKNKKMLVEKILNINVDLTVEDIADFVIK
ELEFWNITKRIEKVKKVNNEFLEKRRNRTYIKSYVLLDKHEKFKIERENK
KDKIVKFFVENIKNNSIKEKIEKILAEFKIDELIKKLEKELKKGNCDTEI
FGIFKKHYKVNFDSKKFSKKSDEEKELYKIIYRYLKGRIEKILVNEQKVR
LKKMEKIEIEKILNESILSEKILKRVKQYTLEHIMYLGKLRHNDIDMTTV
NTDDFSRLHAKEELDLELITFFASTNMELNKIFSRENINNDENIDFFGGD
REKNYVLDKKILNSKIKIIRDLDFIDNKNNITNNFIRKFTKIGTNERNRI
LHAISKERDLQGTQDDYNKVINIIQNLKISDEEVSKALNLDVVFKDKKNI
ITKINDIKISEENNNDIKYLPSFSKVLPEILNLYRNNPKNEPFDTIETEK
IVLNALIYVNKELYKKLILEDDLEENESKNIFLQELKKTLGNIDEIDENI
IENYYKNAQISASKGNNKAIKKYQKKVIECYIGYLRKNYEELFDFSDFKM
NIQEIKKQIKDINDNKTYERITVKTSDKTIVINDDFEYIISIFALLNSNA
VINKIRNRFFATSVWLNTSEYQNIIDILDEIMQLNTLRNECITENWNLNL
EEFIQKMKEIEKDFDDFKIQTKKEIFNNYYEDIKNNILTEFKDDINGCDV
LEKKLEKIVIFDDETKFEIDKKSNILQDEQRKLSNINKKDLKKKVDQYIK
DKDQEIKSKILCRIIFNSDFLKKYKKEIDNLIEDMESENENKFQEIYYPK
ERKNELYIYKKNLFLNIGNPNFDKIYGLISNDIKMADAKFLFNIDGKNIR
KNKISEIDAILKNLNDKLNGYSKEYKEKYIKKLKENDDFFAKNIQNKNYK
SFEKDYNRVSEYKKIRDLVEFNYLNKIESYLIDINWKLAIQMARFERDMH
YIVNGLRELGIIKLSGYNTGISRAYPKRNGSDGFYTTTAYYKFFDEESYK
KFEKICYGFGIDLSENSEINKPENESIRNYISHFYIVRNPFADYSIAEQI
DRVSNLLSYSTRYNNSTYASVFEVFKKDVNLDYDELKKKFKLIGNNDILE
RLMKPKKVSVLELESYNSDYIKNLIIELLTKIENTNDTL

[0268] C2c3, translated from >CEPX01008730.1 marine metagenome genome assembly TARA_037_MES_0.1-0.22, contig TARA_037 MES_0.1-0.22 scaffold22115_1, whole genome shotgun sequence.

(SEQ ID NO: 28)

MRSNYHGGRNARQWRKQISGLARRTKETVFTYKFPLETDAAEIDFDKAVQ
TYGIAEGVGHGSLIGLVCAFHLSGFRLFSKAGEAMAFRNRSRYPTDAFAE
KLSAIMGIQLPTLSPEGLDLIFQSPPRSRDGIAPVWSENEVRNRLYTNWT
GRGPANKPDEHLLEIAGEIAKQVFPKFGGWDDLASDPDKALAAADKYFQS
QGDFPSIASLPAAIMLSPANSTVDFEGDYIAIDPAAETLLHQAVSRCAAR
LGRERPDLDQNKGPFVSSLQDALVSSQNNGLSWLFGVGFQHWKEKSPKEL
IDEYKVPADQHGAVTQVKSFVDAIPLNPLFDTTHYGEFRASVAGKVRSWV
ANYWKRLLDLKSLLATTEFTLPESISDPKAVSLFSGLLVDPQGLKKVADS
LPARLVSAEEAIDRLMGVGIPTAADIAQVERVADEIGAFIGQVQQFNNQV
KQKLENLQDADDEEFLKGLKIELPSGDKEPPAINRISGGAPDAAAEISEL
EEKLQRLLDARSEHFQTISEWAEENAVTLDPIAAMVELERLRLAERGATG
DPEEYALRLLLQRIGRLANRVSPVSAGSIRELLKPVFMEEREFNLFFHNR
LGSLYRSPYSTSRHQPFSIDVGKAKAIDWIAGLDQISSDIEKALSGAGEA
LGDQLRDWINLAGFAISQRLRGLPDTVPNALAQVRCPDDVRIPPLLAMLL
EEDDIARDVCLKAFNLYVSAINGCLFGALREGFIVRTRFQRIGTDQIHYV
PKDKAWEYPDRLNTAKGPINAAVSSDWIEKDGAVIKPVETVRNLSSTGFA
GAGVSEYLVQAPHDWYTPLDLRDVAHLVTGLPVEKNITKLKRLTNRTAFR
MVGASSFKTHLDSVLLSDKIKLGDFTIIIDQHYRQSVTYGGKVKISYEPE
RLQVEAAVPVVDTRDRTVPEPDTLFDHIVAIDLGERSVGFAVFDIKSCLR
TGEVKPIHDNNGNPVVGTVAVPSIRRLMKAVRSHRRRRQPNQKVNQTYST
ALQNYRENVIGDVCNRIDTLMERYNAFPVLEFQIKNFQAGAKQLEIVYGS

[0269] In some embodiments, the nucleic acid programmable DNA binding protein (napDNAbp) of any of the fusion proteins provided herein is a Cas9 from archaea (e.g. nanoarchaea), which constitute a domain and kingdom of single-celled prokaryotic microbes. In some embodiments, the napDNAbp is CasX or CasY, which have been described in, for example, Burstein et al., “New CRISPR-Cas systems from uncultivated microbes.” Cell Res. 2017 Feb. 21. doi: 10.1038/cr.2017.21, which is incorporated herein by reference. Using genome-resolved metagenomics, a number of CRISPR-Cas systems were identified, including the first reported Cas9 in the archaeal domain of life. This divergent Cas9 protein was found in nanoarchaea as part of an active CRISPR-Cas system. In bacteria, two previously unknown systems were discovered, CRISPR-CasX and CRISPR-CasY, which are among the most compact systems yet discovered. In some embodiments, Cas9 refers to CasX, or a variant of CasX. In some embodiments, Cas9 refers to a CasY, or a variant of CasY. It should be appreciated that other RNA-guided DNA binding proteins may be used as a nucleic acid programmable DNA binding protein (napDNAbp) and are within the scope of this disclosure.

[0270] In some embodiments, the nucleic acid programmable DNA binding protein (napDNAbp) of any of the fusion proteins provided herein is a CasX or CasY protein. In some embodiments, the napDNAbp is a CasX protein. In some embodiments, the napDNAbp is a CasY protein. In some embodiments, the napDNAbp comprises an amino acid sequence that is at least 85%, at least 90%, at least 91%, at least 92%, at least 93%, at least 94%, at least 95%, at least 96%, at least 97%, at least 98%, at least 99%, or at least 99.5% identical to a naturally-occurring CasX or CasY protein. In some embodiments, the napDNAbp is a naturally-occurring CasX or CasY protein. In some embodiments, the napDNAbp comprises an amino acid sequence that is at least 85%, at least 90%, at least 91%, at least 92%, at least 93%, at least 94%, at least 95%, at least 96%, at least 97%, at least 98%, at least 99%, or at least 99.5% identical to any one of SEQ ID NOs: 29-31. In some embodiments, the napDNAbp comprises an amino acid sequence of any one SEQ ID NOs: 29-31. It should be appreciated that CasX and CasY from other bacterial species may also be used in accordance with the present disclosure.

CasX (uniprot.org/uniprot/FONN87; uniprot.org/uniprot/FONH53)
>trIF0NN87IF0NN87_SULIH CRISPR-associated Casx protein OS═Sulfolobus islandicus (strain HVE10/4) GN=SiH_0402 PE=4 SV=1

(SEQ ID NO: 29)

MEVPLYNIFGDNYIIQVATEAENSTIYNNKVEIDDEELRNVLNLAYKIAK
NNEDAAAERRGKAKKKKGEEGETTTSNIILPLSGNDKNPWTETLKCYNFP
TTVALSEVFKNFSQVKECEEVSAPSFVKPEFYEFGRSPGMVERTRRVKLE
VEPHYLIIAAAGWVLTRLGKAKVSEGDYVGVNVFTPTRGILYSLIQNVNG
IVPGIKPETAFGLWIARKVVSSVTNPNVSVVRIYTISDAVGQNPTTINGG
FSIDLTKLLEKRYLLSERLEAIARNALSISSNMRERYIVLANYIYEYLTG
SKRLEDLLYFANRDLIMNLNSDDGKVRDLKLISAYVNGELIRGEG

>trIF0NH53IF0NH53_SULIR CRISPR associated protein, Casx OS═Sulfolobus islandicus (strain REY15A) GN=SiRe_0771 PE=4 SV=1

(SEQ ID NO: 30)

MEVPLYNIFGDNYIIQVATEAENSTIYNNKVEIDDEELRNVLNLAYKIAK
NNEDAAAERRGKAKKKKGEEGETTTSNIILPLSGNDKNPWTETLKCYNFP
TTVALSEVFKNFSQVKECEEVSAPSFVKPEFYKFGRSPGMVERTRRVKLE
VEPHYLIMAAAGWVLTRLGKAKVSEGDYVGVNVFTPTRGILYSLIQNVNG
IVPGIKPETAFGLWIARKVVSSVTNPNVSVVSIYTISDAVGQNPTTINGG
FSIDLTKLLEKRDLLSERLEAIARNALSISSNMRERYIVLANYIYEYLTG
SKRLEDLLYFANRDLIMNLNSDDGKVRDLKLISAYVNGELIRGEG

CasY (ncbi.nlm.nih.gov/protein/APG80656.1)
>APG80656.1 CRISPR-associated protein CasY [uncultured Parcubacteria group bacterium]

(SEQ ID NO: 31)

MSKRHPRISGVKGYRLHAQRLEYTGKSGAMRTIKYPLYSSPSGGRTVPRE
IVSAINDDYVGLYGLSNFDDLYNAEKRNEEKVYSVLDFWYDCVQYGAVFS
YTAPGLLKNVAEVRGGSYELTKTLKGSHLYDELQIDKVIKFLNKKEISRA
NGSLDKLKKDIIDCFKAEYRERHKDQCNKLADDIKNAKKDAGASLGERQK
KLFRDFFGISEQSENDKPSFTNPLNLTCCLLPFDTVNNNRNRGEVLFNKL
KEYAQKLDKNEGSLEMWEYIGIGNSGTAFSNFLGEGFLGRLRENKITELK
KAMMDITDAWRGQEQEEELEKRLRILAALTIKLREPKFDNHWGGYRSDIN
GKLSSWLQNYINQTVKIKEDLKGHKKDLKKAKEMINRFGESDTKEEAVVS
SLLESIEKIVPDDSADDEKPDIPAIAIYRRFLSDGRLTLNRFVQREDVQE
ALIKERLEAEKKKKPKKRKKKSDAEDEKETIDFKELFPHLAKPLKLVPNF
YGDSKRELYKKYKNAAIYTDALWKAVEKIYKSAFSSSLKNSFFDTDFDKD
FFIKRLQKIFSVYRRFNTDKWKPIVKNSFAPYCDIVSLAENEVLYKPKQS
RSRKSAAIDKNRVRLPSTENIAKAGIALARELSVAGFDWKDLLKKEEHEE
YIDLIELHKTALALLLAVTETQLDISALDFVENGTVKDFMKTRDGNLVLE
GRFLEMFSQSIVFSELRGLAGLMSRKEFITRSAIQTMNGKQAELLYIPHE
FQSAKITTPKEMSRAFLDLAPAEFATSLEPESLSEKSLLKLKQMRYYPHY
FGYELTRTGQGIDGGVAENALRLEKSPVKKREIKCKQYKTLGRGQNKIVL
YVRSSYYQTQFLEWFLHRPKNVQTDVAVSGSFLIDEKKVKTRWNYDALTV
ALEPVSGSERVFVSQPFTIFPEKSAEEEGQRYLGIDIGEYGIAYTALEIT
GDSAKILDQNFISDPQLKTLREEVKGLKLDQRRGTFAMPSTKIARIRESL
VHSLRNRIHHLALKHKAKIVYELEVSRFEEGKQKIKKVYATLKKADVYSE
IDADKNLQTTVWGKLAVASEISASYTSQFCGACKKLWRAEMQVDETITTQ
ELIGTVRVIKGGTLIDAIKDFMRPPIFDENDTPFPKYRDFCDKHHISKKM
RGNSCLFICPFCRANADADIQASQTIALLRYVKEEKKVEDYFERFRKLKN
IKVLGQMKKI

### Cas9 Domains of Nucleobase Editors

[0271] Non-limiting, exemplary Cas9 domains are provided herein. The Cas9 domain may be a nuclease active Cas9 domain, a nucleasae inactive Cas9 domain, or a Cas9 nickase. In some embodiments, the Cas9 domain is a nuclease active domain. For example, the Cas9 domain may be a Cas9 domain that cuts both strands of a duplexed nucleic acid (e.g., both strands of a duplexed DNA molecule). In some embodiments, the Cas9 domain comprises any Cas9 protein, such as any one of the Cas9 amino acid sequences as provided herein. In some embodiments the Cas9 domain comprises an amino acid sequence that is at least 60%, at least 65%, at least 70%, at least 75%, at least 80%, at least 85%, at least 90%, at least 95%, at least 96%, at least 97%, at least 98%, at least 99%, or at least 99.5% identical to any Cas9 protein, such as any one of the Cas9 amino acid sequences as provided herein. In some embodiments, the Cas9 domain comprises an amino acid sequence that has 1, 2, 3, 4, 5, 6, 7, 8, 9, 10, 11, 12, 13, 14, 15, 16, 17, 18, 19, 20, 21, 22, 21, 24, 25, 26, 27, 28, 29, 30, 31, 32, 33, 34, 35, 36, 37, 38, 39, 40, 41, 42, 43, 44, 45, 46, 47, 48, 49, 50, or more mutations compared to any Cas9 protein, such as any one of the Cas9 amino acid sequences as provided herein. In some embodiments, the Cas9 domain comprises an amino acid sequence that has at least 10, at least 15, at least 20, at least 30, at least 40, at least 50, at least 60, at least 70, at least 80, at least 90, at least 100, at least 150, at least 200, at least 250, at least 300, at least 350, at least 400, at least 500, at least 600, at least 700, at least 800, at least 900, at least 1000, at least 1100, or at least 1200 identical contiguous amino acid residues as compared to any Cas9 protein, such as any one of the Cas9 amino acid sequences as provided herein.

[0272] In some embodiments, the Cas9 domain is a nuclease-inactive Cas9 domain (dCas9). For example, the dCas9 domain may bind to a duplexed nucleic acid molecule (e.g., via a gRNA molecule) without cleaving either strand of the duplexed nucleic acid molecule. In some embodiments, the nuclease-inactive dCas9 domain comprises a D10× mutation and a H840X mutation of the amino acid sequence set forth in SEQ ID NO: 6, or a corresponding mutation in any Cas9 protein, such as any one of the Cas9 amino acid sequences as provided herein, wherein X is any amino acid change. In some embodiments, the nuclease-inactive dCas9 domain comprises a D10A mutation and a H840A mutation of the amino acid sequence set forth in SEQ ID NO: 6, or a corresponding mutation in any Cas9 protein, such as any one of the Cas9 amino acid sequences as provided herein. As one example, a nuclease-inactive Cas9 domain comprises the amino acid sequence set forth in SEQ ID NO: 32 (Cloning vector pPlatTET-gRNA2, Accession No. BAV54124). MDKKYSIGLAIGTNSVGWAVITDEYKVPSKKFKVLGNTDRHSIKKNLIGALLFDSGET AEATRLKRTARRRYTRRKNRICYLQEIFSNEMAKVDDSFFHRLEES FLVEEDKKHERH PIFGNIVDEVAYHEKYPTIYHLRKKLVDSTDKADLRLIYLALAHMIKFRGHFLIEGDLN PDNSDVDKLFIQLVQTYNQLFEENPINASGVDAKAILSARLSKSRRLENLIAQLPGEKK NGLFGNLIALSLGLTPNFKSNFDLAEDAKLQLS KDTYDDDLDNLLAQIGDQYADLFLA AKNLSDAILLSDILRVNTEITKAPLSASMIKRYDEHHQDLTLLKALVRQQLPEKYKEIF FDQS KNGYAGYIDGGAS QEEFYKFIKPILEKMDGTEELLVKLNREDLLRKQRTFDNGS IPHQIHLGELHAILRRQEDFYPFLKDNREKIEKILTFRIPYYVGPLARGNSRFAWMTRKS EETITPWNFEEVVDKGASAQSFIERMTNFDKNLPNEKVLPKHSLLYEYFTVYNELTKV KYVTEGMRKPAFLSGEQKKAIVDLLFKTNRKVTVKQLKEDYFKKIECFDSVEISGVED RFNASLGTYHDLLKIIKDKDFLDNEENEDILEDIVLTLTLFEDREMIEERLKTYAHLFD DKVMKQLKRRRYTGWGRLSRKLINGIRDKQSGKTILDFLKSDGFANRNFMQLIHDDS LTFKEDIQKAQVSGQGDSLHEHIANLAGSPAIKKGILQTVKVVDELVKVMGRHKPENI VIEMARENQTTQKGQKNSRERMKRIEEGIKELGSQILKEHPVENTQLQNEKLYLYYLQ NGRDMYVDQELDINRLSDYDVDAIVPQSFLKDDSIDNKVLTRSDKNRGKSDNVPSEE VVKKMKNYWRQLLNAKLITQRKFDNLTKAERGGLSELDKAGFIKRQLVETRQITKH VAQILDSRMNTKYDENDKLIREVKVITLKSKLVSDFRKDFQFYKVREINNYHHAHDA YLNAVVGTALIKKYPKLESEFVYGDYKVYDVRKMIAKSEQEIGKATAKYFFYSNIMN FFKTEITLANGEIRKRPLIETNGETGEIVWDKGRDFATVRKVLSMPQVNIVKKTEVQT GGFSKESILPKRNSDKLIARKKDWDPKKYGGFDSPTVAYSVLVVAKVEKGKSKKLKS VKELLGITIMERSSFEKNPIDFLEAKGYKEVKKDLIIKLPKYSLFELENGRKRMLASAG ELQKGNELALPSKYVNFLYLASHYEKLKGSPEDNEQKQLFVEQHKHYLDEIIEQISEFS KRVILADANLDKVLSAYNKHRDKPIREQAENIIHLFTLTNLGAPAAFKYFDTTIDRKR YTSTKEVLDATLIHQSITGLYETRIDLSQLGGD (SEQ ID NO: 32; see, e.g., Qi et al., Repurposing CRISPR as an RNA-guided platform for sequence-specific control of gene expression. Cell. 2013; 152(5):1173-83, the entire contents of which are incorporated herein by reference).

[0273] Additional suitable nuclease-inactive dCas9 domains will be apparent to those of skill in the art based on this disclosure and knowledge in the field, and are within the scope of this disclosure. Such additional exemplary suitable nuclease-inactive Cas9 domains include, but are not limited to, D10A/H840A, D10A/D839A/H840A, and D10A/D839A/H840A/N863A mutant domains (See, e.g., Prashant et al., CAS9 transcriptional activators for target specificity screening and paired nickases for cooperative genome engineering. Nature Biotechnology. 2013; 31(9): 833-838, the entire contents of which are incorporated herein by reference). In some embodiments the dCas9 domain comprises an amino acid sequence that is at least 60%, at least 65%, at least 70%, at least 75%, at least 80%, at least 85%, at least 90%, at least 95%, at least 96%, at least 97%, at least 98%, at least 99%, or at least 99.5% identical to any one of the dCas9 domains provided herein. In some embodiments, the Cas9 domain comprises an amino acid sequences that has 1, 2, 3, 4, 5, 6, 7, 8, 9, 10, 11, 12, 13, 14, 15, 16, 17, 18, 19, 20, 21, 22, 21, 24, 25, 26, 27, 28, 29, 30, 31, 32, 33, 34, 35, 36, 37, 38, 39, 40, 41, 42, 43, 44, 45, 46, 47, 48, 49, 50 or more or more mutations compared to any Cas9 protein, such as any one of the Cas9 amino acid sequences as provided herein. In some embodiments, the Cas9 domain comprises an amino acid sequence that has at least 10, at least 15, at least 20, at least 30, at least 40, at least 50, at least 60, at least 70, at least 80, at least 90, at least 100, at least 150, at least 200, at least 250, at least 300, at least 350, at least 400, at least 500, at least 600, at least 700, at least 800, at least 900, at least 1000, at least 1100, or at least 1200 identical contiguous amino acid residues as compared to any Cas9 protein, such as any one of the Cas9 amino acid sequences as provided herein.

[0274] In some embodiments, the Cas9 domain is a Cas9 nickase. The Cas9 nickase may be a Cas9 protein that is capable of cleaving only one strand of a duplexed nucleic acid molecule (e.g., a duplexed DNA molecule). In some embodiments the Cas9 nickase cleaves the target strand of a duplexed nucleic acid molecule, meaning that the Cas9 nickase cleaves the strand that is base paired to (complementary to) a gRNA (e.g., an sgRNA) that is bound to the Cas9. In some embodiments, a Cas9 nickase comprises a D10A mutation and has a histidine at position 840 of SEQ ID NO: 6, or a mutation in any Cas9 protein, such as any one of the Cas9 amino acid sequences as provided herein. For example, a Cas9 nickase may comprise the amino acid sequence as set forth in SEQ ID NO: 8. In some embodiments the Cas9 nickase cleaves the non-target, non-base-edited strand of a duplexed nucleic acid molecule, meaning that the Cas9 nickase cleaves the strand that is not base paired to a gRNA (e.g., an sgRNA) that is bound to the Cas9. In some embodiments, a Cas9 nickase comprises an H840A mutation and has an aspartic acid residue at position 10 of SEQ ID NO: 6, or a corresponding mutation in any Cas9 protein, such as any one of the Cas9 amino acid sequences as provided herein. In some embodiments the Cas9 nickase comprises an amino acid sequence that is at least 60%, at least 65%, at least 70%, at least 75%, at least 80%, at least 85%, at least 90%, at least 95%, at least 96%, at least 97%, at least 98%, at least 99%, or at least 99.5% identical to any one of the Cas9 nickases provided herein. Additional suitable Cas9 nickases will be apparent to those of skill in the art based on this disclosure and knowledge in the field, and are within the scope of this disclosure.

Cas9 Domains with Reduced PAM Exclusivity

[0275] Some aspects of the disclosure provide Cas9 domains that have different PAM specificities. Typically, Cas9 proteins, such as Cas9 from S. pyogenes (spCas9), require a canonical NGG PAM sequence to bind a particular nucleic acid region. This may limit the ability to edit desired bases within a genome. In some embodiments, the base editing fusion proteins provided herein may need to be placed at a precise location, for example where a target base is placed within a 4 base region (e.g., a “deamination window”), which is approximately 15 bases upstream of the PAM. See Komor, A. C., et al., “Programmable editing of a target base in genomic DNA without double-stranded DNA cleavage” Nature 533, 420-424 (2016), the entire contents of which are hereby incorporated by reference. Accordingly, in some embodiments, any of the fusion proteins provided herein may contain a Cas9 domain that is capable of binding a nucleotide sequence that does not contain a canonical (e.g., NGG) PAM sequence. Cas9 domains that bind to non-canonical PAM sequences have been described in the art and would be apparent to the skilled artisan. For example, Cas9 domains that bind non-canonical PAM sequences have been described in Kleinstiver, B. P., et al., “Engineered CRISPR-Cas9 nucleases with altered PAM specificities” Nature 523, 481-485 (2015); and Kleinstiver, B. P., et al., “Broadening the targeting range of Staphylococcus aureus CRISPR-Cas9 by modifying PAM recognition” Nature Biotechnology 33, 1293-1298 (2015); the entire contents of each are hereby incorporated by reference.

[0276] In some embodiments, the Cas9 domain is a Cas9 domain from Staphylococcus aureus (SaCas9). In some embodiments, the SaCas9 domain is a nuclease active SaCas9, a nuclease inactive SaCas9 (SaCas9d), or a SaCas9 nickase (SaCas9n). In some embodiments, the SaCas9 comprises the amino acid sequence SEQ ID NO: 33. In some embodiments, the SaCas9 comprises a N579X mutation of SEQ ID NO: 33, or a corresponding mutation in any Cas9 protein, such as any one of the Cas9 amino acid sequences as provided herein, wherein X is any amino acid except for N. In some embodiments, the SaCas9 comprises a N579A mutation of SEQ ID NO: 33, or a corresponding mutation in any Cas9 protein, such as any one of the Cas9 amino acid sequences as provided herein. In some embodiments, the SaCas9 domain, the SaCas9d domain, or the SaCas9n domain can bind to a nucleic acid sequence having a non-canonical PAM. In some embodiments, the SaCas9 domain, the SaCas9d domain, or the SaCas9n domain can bind to a nucleic acid sequence having a NNGRRT PAM sequence. In some embodiments, the SaCas9 domain comprises one or more of a E781X, a N967X, and a R1014X mutation of SEQ ID NO: 33, or a corresponding mutation in any Cas9 protein, such as any one of the Cas9 amino acid sequences as provided herein, wherein X is any amino acid. In some embodiments, the SaCas9 domain comprises one or more of a E781K, a N967K, and a R1014H mutation of SEQ ID NO: 33, or one or more corresponding mutation in any Cas9 protein, such as any one of the Cas9 amino acid sequences as provided herein. In some embodiments, the SaCas9 domain comprises a E781K, a N967K, or a R1014H mutation of SEQ ID NO: 33, or corresponding mutations in any Cas9 protein, such as any one of the Cas9 amino acid sequences as provided herein.

[0277] In some embodiments, the Cas9 domain of any of the fusion proteins provided herein comprises an amino acid sequence that is at least 60%, at least 65%, at least 70%, at least 75%, at least 80%, at least 85%, at least 90%, at least 95%, at least 96%, at least 97%, at least 98%, at least 99%, or at least 99.5% identical to any one of SEQ ID NOs: 33-36. In some embodiments, the Cas9 domain of any of the fusion proteins provided herein comprises the amino acid sequence of any one of SEQ ID NOs: 33-36. In some embodiments, the Cas9 domain of any of the fusion proteins provided herein consists of the amino acid sequence of any one of SEQ ID NOs: 33-36.

### Exemplary SaCas9 Sequence

(SEQ ID NO: 33)

KRNYILGLDIGITSVGYGIIDYETRDVIDAGVRLFKEANVENNEGRRSKR
GARRLKRRRRHRIQRVKKLLFDYNLLTDHSELSGINPYEARVKGLSQKLS
EEEFSAALLHLAKRRGVHNVNEVEEDTGNELSTKEQISRNSKALEEKYVA
ELQLERLKKDGEVRGSINRFKTSDYVKEAKQLLKVQKAYHQLDQSFIDTY
IDLLETRRTYYEGPGEGSPFGWKDIKEWYEMLMGHCTYFPEELRSVKYAY
NADLYNALNDLNNLVITRDENEKLEYYEKFQIIENVFKQKKKPTLKQIAK
EILVNEEDIKGYRVTSTGKPEFTNLKVYHDIKDITARKEIIENAELLDQI
AKILTIYQSSEDIQEELTNLNSELTQEEIEQISNLKGYTGTHNLSLKAIN
LILDELWHTNDNQIAIFNRLKLVPKKVDLSQQKEIPTTLVDDFILSPVVK
RSFIQSIKVINAIIKKYGLPNDIIIELAREKNSKDAQKMINEMQKRNRQT
NERIEEIIRTTGKENAKYLIEKIKLHDMQEGKCLYSLEAIPLEDLLNNPF
NYEVDHIIPRSVSFDNSFNNKVLVKQEENSKKGNRTPFQYLSSSDSKISY
ETFKKHILNLAKGKGRISKTKKEYLLEERDINRFSVQKDFINRNLVDTRY
ATRGLMNLLRSYFRVNNLDVKVKSINGGFTSFLRRKWKFKKERNKGYKHH
AEDALIIANADFIFKEWKKLDKAKKVMENQMFEEKQAESMPEIETEQEYK
EIFITPHQIKHIKDFKDYKYSHRVDKKPNRELINDTLYSTRKDDKGNTLI
VNNLNGLYDKDNDKLKKLINKSPEKLLMYHHDPQTYQKLKLIMEQYGDEK
NPLYKYYEETGNYLTKYSKKDNGPVIKKIKYYGNKLNAHLDITDDYPNSR
NKVVKLSLKPYRFDVYLDNGVYKFVTVKNLDVIKKENYYEVNSKCYEEAK
KLKKISNQAEFIASFYNNDLIKINGELYRVIGVNNDLLNRIEVNMIDITY
REYLENMNDKRPPRIIKTIASKTQSIKKYSTDILGNLYEVKSKKHPQIIK
KG

Residue N579 of SEQ ID NO: 33, which is underlined and in bold, may be mutated (e.g., to a A579) to yield a SaCas9 nickase.

### Exemplary SaCas9d Sequence

(SEQ ID NO: 34)

KRNYILGLAIGITSVGYGIIDYETRDVIDAGVRLFKEANVENNEGRRSKR
GARRLKRRRRHRIQRVKKLLFDYNLLTDHSELSGINPYEARVKGLSQKLS
EEEFSAALLHLAKRRGVHNVNEVEEDTGNELSTKEQISRNSKALEEKYVA
ELQLERLKKDGEVRGSINRFKTSDYVKEAKQLLKVQKAYHQLDQSFIDTY
IDLLETRRTYYEGPGEGSPFGWKDIKEWYEMLMGHCTYFPEELRSVKYAY
NADLYNALNDLNNLVITRDENEKLEYYEKFQIIENVFKQKKKPTLKQIAK
EILVNEEDIKGYRVTSTGKPEFTNLKVYHDIKDITARKEIIENAELLDQI
AKILTIYQSSEDIQEELTNLNSELTQEEIEQISNLKGYTGTHNLSLKAIN
LILDELWHTNDNQIAIFNRLKLVPKKVDLSQQKEIPTTLVDDFILSPVVK
RSFIQSIKVINAIIKKYGLPNDIIIELAREKNSKDAQKMINEMQKRNRQT
NERIEEIIRTTGKENAKYLIEKIKLHDMQEGKCLYSLEAIPLEDLLNNPF
NYEVDHIIPRSVSFDNSFNNKVLVKQEENSKKGNRTPFQYLSSSDSKISY
ETFKKHILNLAKGKGRISKTKKEYLLEERDINRFSVQKDFINRNLVDTRY
ATRGLMNLLRSYFRVNNLDVKVKSINGGFTSFLRRKWKFKKERNKGYKHH
AEDALIIANADFIFKEWKKLDKAKKVMENQMFEEKQAESMPEIETEQEYK
EIFITPHQIKHIKDFKDYKYSHRVDKKPNRELINDTLYSTRKDDKGNTLI
VNNLNGLYDKDNDKLKKLINKSPEKLLMYHHDPQTYQKLKLIMEQYGDEK
NPLYKYYEETGNYLTKYSKKDNGPVIKKIKYYGNKLNAHLDITDDYPNSR
NKVVKLSLKPYRFDVYLDNGVYKFVTVKNLDVIKKENYYEVNSKCYEEAK
KLKKISNQAEFIASFYNNDLIKINGELYRVIGVNNDLLNRIEVNMIDITY
REYLENMNDKRPPRIIKTIASKTQSIKKYSTDILGNLYEVKSKKHPQIIK
KG

Residue D10 of SEQ ID NO: 34, which is underlined and in bold, may be mutated (e.g., to a A10) to yield a nuclease inactive SaCas9d.

### Exemplary SaCas9n Sequence

(SEQ ID NO: 35)

KRNYILGLDIGITSVGYGIIDYETRDVIDAGVRLFKEANVENNEGRRSKR
GARRLKRRRRHRIQRVKKLLFDYNLLTDHSELSGINPYEARVKGLSQKLS
EEEFSAALLHLAKRRGVHNVNEVEEDTGNELSTKEQISRNSKALEEKYVA
ELQLERLKKDGEVRGSINRFKTSDYVKEAKQLLKVQKAYHQLDQSFIDTY
IDLLETRRTYYEGPGEGSPFGWKDIKEWYEMLMGHCTYFPEELRSVKYAY
NADLYNALNDLNNLVITRDENEKLEYYEKFQIIENVFKQKKKPTLKQIAK
EILVNEEDIKGYRVTSTGKPEFTNLKVYHDIKDITARKEIIENAELLDQI
AKILTIYQSSEDIQEELTNLNSELTQEEIEQISNLKGYTGTHNLSLKAIN
LILDELWHTNDNQIAIFNRLKLVPKKVDLSQQKEIPTTLVDDFILSPVVK
RSFIQSIKVINAIIKKYGLPNDIIIELAREKNSKDAQKMINEMQKRNRQT
NERIEEIIRTTGKENAKYLIEKIKLHDMQEGKCLYSLEAIPLEDLLNNPF
NYEVDHIIPRSVSFDNSFNNKVLVKQEEASKKGNRTPFQYLSSSDSKISY
ETFKKHILNLAKGKGRISKTKKEYLLEERDINRFSVQKDFINRNLVDTRY
ATRGLMNLLRSYFRVNNLDVKVKSINGGFTSFLRRKWKFKKERNKGYKHH
AEDALIIANADFIFKEWKKLDKAKKVMENQMFEEKQAESMPEIETEQEYK
EIFITPHQIKHIKDFKDYKYSHRVDKKPNRELINDTLYSTRKDDKGNTLI
VNNLNGLYDKDNDKLKKLINKSPEKLLMYHHDPQTYQKLKLIMEQYGDEK
NPLYKYYEETGNYLTKYSKKDNGPVIKKIKYYGNKLNAHLDITDDYPNSR
NKVVKLSLKPYRFDVYLDNGVYKFVTVKNLDVIKKENYYEVNSKCYEEAK
KLKKISNQAEFIASFYNNDLIKINGELYRVIGVNNDLLNRIEVNMIDITY
REYLENMNDKRPPRIIKTIASKTQSIKKYSTDILGNLYEVKSKKHPQIIK
KG.

Residue A579 of SEQ ID NO: 35, which can be mutated from N579 of SEQ ID NO: 33 to yield a SaCas9 nickase, is underlined and in bold.

### Exemplary SaKKH Cas9

(SEQ ID NO: 36)

KRNYILGLDIGITSVGYGIIDYETRDVIDAGVRLFKEANVENNEGRRSKR
GARRLKRRRRHRIQRVKKLLFDYNLLTDHSELSGINPYEARVKGLSQKLS
EEEFSAALLHLAKRRGVHNVNEVEEDTGNELSTKEQISRNSKALEEKYVA
ELQLERLKKDGEVRGSINRFKTSDYVKEAKQLLKVQKAYHQLDQSFIDTY
IDLLETRRTYYEGPGEGSPFGWKDIKEWYEMLMGHCTYFPEELRSVKYAY
NADLYNALNDLNNLVITRDENEKLEYYEKFQIIENVFKQKKKPTLKQIAK
EILVNEEDIKGYRVTSTGKPEFTNLKVYHDIKDITARKEIIENAELLDQI
AKILTIYQSSEDIQEELTNLNSELTQEEIEQISNLKGYTGTHNLSLKAIN
LILDELWHTNDNQIAIFNRLKLVPKKVDLSQQKEIPTTLVDDFILSPVVK
RSFIQSIKVINAIIKKYGLPNDIIIELAREKNSKDAQKMINEMQKRNRQT
NERIEEIIRTTGKENAKYLIEKIKLHDMQEGKCLYSLEAIPLEDLLNNPF
NYEVDHIIPRSVSFDNSFNNKVLVKQEEASKKGNRTPFQYLSSSDSKISY
ETFKKHILNLAKGKGRISKTKKEYLLEERDINRFSVQKDFINRNLVDTRY
ATRGLMNLLRSYFRVNNLDVKVKSINGGFTSFLRRKWKFKKERNKGYKHH
AEDALIIANADFIFKEWKKLDKAKKVMENQMFEEKQAESMPEIETEQEYK
EIFITPHQIKHIKDFKDYKYSHRVDKKPNRKLINDTLYSTRKDDKGNTLI
VNNLNGLYDKDNDKLKKLINKSPEKLLMYHHDPQTYQKLKLIMEQYGDEK
NPLYKYYEETGNYLTKYSKKDNGPVIKKIKYYGNKLNAHLDITDDYPNSR
NKVVKLSLKPYRFDVYLDNGVYKFVTVKNLDVIKKENYYEVNSKCYEEAK
KLKKISNQAEFIASFYKNDLIKINGELYRVIGVNNDLLNRIEVNMIDITY
REYLENMNDKRPPHIIKTIASKTQSIKKYSTDILGNLYEVKSKKHPQIIK
KG.

Residue A579 of SEQ ID NO: 36, which can be mutated from N579 of SEQ ID NO: 36 to yield a SaCas9 nickase, is underlined and in bold. Residues K781, K967, and H1014 of SEQ ID NO: 36, which can be mutated from E781, N967, and R1014 of SEQ ID NO: 36 to yield a SaKKH Cas9 are underlined and in italics.

[0282] In some embodiments, the Cas9 domain is a Cas9 domain from Streptococcus pyogenes (SpCas9). In some embodiments, the SpCas9 domain is a nuclease active SpCas9, a nuclease inactive SpCas9 (SpCas9d), or a SpCas9 nickase (SpCas9n). In some embodiments, the SpCas9 comprises the amino acid sequence SEQ ID NO: 37. In some embodiments, the SpCas9 comprises a D9X mutation of SEQ ID NO: 37, or a corresponding mutation in any Cas9 protein, such as any one of the Cas9 amino acid sequences as provided herein, wherein X is any amino acid except for D. In some embodiments, the SpCas9 comprises a D9A mutation of SEQ ID NO: 37, or a corresponding mutation in any Cas9 protein, such as any one of the Cas9 amino acid sequences as provided herein. In some embodiments, the SpCas9 domain, the SpCas9d domain, or the SpCas9n domain can bind to a nucleic acid sequence having a non-canonical PAM. In some embodiments, the SpCas9 domain, the SpCas9d domain, or the SpCas9n domain can bind to a nucleic acid sequence having a NGG, a NGA, or a NGCG PAM sequence. In some embodiments, the SpCas9 domain comprises one or more of a D1134X, a R1334X, and a T1336X mutation of SEQ ID NO: 37, or a corresponding mutation in any Cas9 protein, such as any one of the Cas9 amino acid sequences as provided herein, wherein X is any amino acid. In some embodiments, the SpCas9 domain comprises one or more of a D1134E, R1334Q, and T1336R mutation of SEQ ID NO: 37, or a corresponding mutation in any Cas9 protein, such as any one of the Cas9 amino acid sequences as provided herein. In some embodiments, the SpCas9 domain comprises a D1134E, a R1334Q, and a T1336R mutation of SEQ ID NO: 37, or corresponding mutations in any Cas9 protein, such as any one of the Cas9 amino acid sequences as provided herein. In some embodiments, the SpCas9 domain comprises one or more of a D1134X, a R1334X, and a T1336X mutation of SEQ ID NO: 37, or a corresponding mutation in any Cas9 protein, such as any one of the Cas9 amino acid sequences as provided herein, wherein X is any amino acid. In some embodiments, the SpCas9 domain comprises one or more of a D1134V, a R1334Q, and a T1336R mutation of SEQ ID NO: 37, or a corresponding mutation in any Cas9 protein, such as any one of the Cas9 amino acid sequences as provided herein. In some embodiments, the SpCas9 domain comprises a D1134V, a R1334Q, and a T1336R mutation of SEQ ID NO: 37, or corresponding mutations in any Cas9 protein, such as any one of the Cas9 amino acid sequences as provided herein. In some embodiments, the SpCas9 domain comprises one or more of a D1134X, a G1217X, a R1334X, and a T1336X mutation of SEQ ID NO: 37, or a corresponding mutation in any Cas9 protein, such as any one of the Cas9 amino acid sequences as provided herein, wherein X is any amino acid. In some embodiments, the SpCas9 domain comprises one or more of a D1134V, a G1217R, a R1334Q, and a T1336R mutation of SEQ ID NO: 37, or a corresponding mutation in any Cas9 protein, such as any one of the Cas9 amino acid sequences as provided herein. In some embodiments, the SpCas9 domain comprises a D1134V, a G1217R, a R1334Q, and a T1336R mutation of SEQ ID NO: 37, or corresponding mutations in any Cas9 protein, such as any one of the Cas9 amino acid sequences as provided herein.

[0283] In some embodiments, the Cas9 domain of any of the fusion proteins provided herein comprises an amino acid sequence that is at least 60%, at least 65%, at least 70%, at least 75%, at least 80%, at least 85%, at least 90%, at least 95%, at least 96%, at least 97%, at least 98%, at least 99%, or at least 99.5% identical to any one of SEQ ID NOs: 37-41. In some embodiments, the Cas9 domain of any of the fusion proteins provided herein comprises the amino acid sequence of any one of SEQ ID NOs: 37-41. In some embodiments, the Cas9 domain of any of the fusion proteins provided herein consists of the amino acid sequence of any one of SEQ ID NOs: 37-41.

### Exemplary SpCas9

(SEQ ID NO: 37)

DKKYSIGLDIGTNSVGWAVITDEYKVPSKKFKVLGNTDRHSIKKNLIGAL
LFDSGETAEATRLKRTARRRYTRRKNRICYLQEIFSNEMAKVDDSFFHRL
EESFLVEEDKKHERHPIFGNIVDEVAYHEKYPTIYHLRKKLVDSTDKADL
RLIYLALAHMIKFRGHFLIEGDLNPDNSDVDKLFIQLVQTYNQLFEENPI
NASGVDAKAILSARLSKSRRLENLIAQLPGEKKNGLFGNLIALSLGLTPN
FKSNFDLAEDAKLQLSKDTYDDDLDNLLAQIGDQYADLFLAAKNLSDAIL
LSDILRVNTEITKAPLSASMIKRYDEHHQDLTLLKALVRQQLPEKYKEIF
FDQSKNGYAGYIDGGASQEEFYKFIKPILEKMDGTEELLVKLNREDLLRK
QRTFDNGSIPHQIHLGELHAILRRQEDFYPFLKDNREKIEKILTFRIPYY
VGPLARGNSRFAWMTRKSEETITPWNFEEVVDKGASAQSFIERMTNFDKN
LPNEKVLPKHSLLYEYFTVYNELTKVKYVTEGMRKPAFLSGEQKKAIVDL
LFKTNRKVTVKQLKEDYFKKIECFDSVEISGVEDRFNASLGTYHDLLKII
KDKDFLDNEENEDILEDIVLTLTLFEDREMIEERLKTYAHLFDDKVMKQL
KRRRYTGWGRLSRKLINGIRDKQSGKTILDFLKSDGFANRNFMQLIHDDS
LTFKEDIQKAQVSGQGDSLHEHIANLAGSPAIKKGILQTVKVVDELVKVM
GRHKPENIVIEMARENQTTQKGQKNSRERMKRIEEGIKELGSQILKEHPV
ENTQLQNEKLYLYYLQNGRDMYVDQELDINRLSDYDVDHIVPQSFLKDDS
IDNKVLTRSDKNRGKSDNVPSEEVVKKMKNYWRQLLNAKLITQRKFDNLT
KAERGGLSELDKAGFIKRQLVETRQITKHVAQILDSRMNTKYDENDKLIR
EVKVITLKSKLVSDFRKDFQFYKVREINNYHHAHDAYLNAVVGTALIKKY
PKLESEFVYGDYKVYDVRKMIAKSEQEIGKATAKYFFYSNIMNFFKTEIT
LANGEIRKRPLIETNGETGEIVWDKGRDFATVRKVLSMPQVNIVKKTEVQ
TGGFSKESILPKRNSDKLIARKKDWDPKKYGGFDSPTVAYSVLVVAKVEK
GKSKKLKSVKELLGITIMERSSFEKNPIDFLEAKGYKEVKKDLIIKLPKY
SLFELENGRKRMLASAGELQKGNELALPSKYVNFLYLASHYEKLKGSPED
NEQKQLFVEQHKHYLDEIIEQISEFSKRVILADANLDKVLSAYNKHRDKP
IREQAENIIHLFTLTNLGAPAAFKYFDTTIDRKRYTSTKEVLDATLIHQS
ITGLYETRIDLSQLGGD

### Exemplary SpCas9n

(SEQ ID NO: 38)

DKKYSIGLAIGTNSVGWAVITDEYKVPSKKFKVLGNTDRHSIKKNLIGAL
LFDSGETAEATRLKRTARRRYTRRKNRICYLQEIFSNEMAKVDDSFFHRL
EESFLVEEDKKHERHPIFGNIVDEVAYHEKYPTIYHLRKKLVDSTDKADL
RLIYLALAHMIKFRGHFLIEGDLNPDNSDVDKLFIQLVQTYNQLFEENPI
NASGVDAKAILSARLSKSRRLENLIAQLPGEKKNGLFGNLIALSLGLTPN
FKSNFDLAEDAKLQLSKDTYDDDLDNLLAQIGDQYADLFLAAKNLSDAIL
LSDILRVNTEITKAPLSASMIKRYDEHHQDLTLLKALVRQQLPEKYKEIF
FDQSKNGYAGYIDGGASQEEFYKFIKPILEKMDGTEELLVKLNREDLLRK
QRTFDNGSIPHQIHLGELHAILRRQEDFYPFLKDNREKIEKILTFRIPYY
VGPLARGNSRFAWMTRKSEETITPWNFEEVVDKGASAQSFIERMTNFDKN
LPNEKVLPKHSLLYEYFTVYNELTKVKYVTEGMRKPAFLSGEQKKAIVDL
LFKTNRKVTVKQLKEDYFKKIECFDSVEISGVEDRFNASLGTYHDLLKII
KDKDFLDNEENEDILEDIVLTLTLFEDREMIEERLKTYAHLFDDKVMKQL
KRRRYTGWGRLSRKLINGIRDKQSGKTILDFLKSDGFANRNFMQLIHDDS
LTFKEDIQKAQVSGQGDSLHEHIANLAGSPAIKKGILQTVKVVDELVKVM
GRHKPENIVIEMARENQTTQKGQKNSRERMKRIEEGIKELGSQILKEHPV
ENTQLQNEKLYLYYLQNGRDMYVDQELDINRLSDYDVDHIVPQSFLKDDS
IDNKVLTRSDKNRGKSDNVPSEEVVKKMKNYWRQLLNAKLITQRKFDNLT
KAERGGLSELDKAGFIKRQLVETRQITKHVAQILDSRMNTKYDENDKLIR
EVKVITLKSKLVSDFRKDFQFYKVREINNYHHAHDAYLNAVVGTALIKKY
PKLESEFVYGDYKVYDVRKMIAKSEQEIGKATAKYFFYSNIMNFFKTEIT
LANGEIRKRPLIETNGETGEIVWDKGRDFATVRKVLSMPQVNIVKKTEVQ
TGGFSKESILPKRNSDKLIARKKDWDPKKYGGFDSPTVAYSVLVVAKVEK
GKSKKLKSVKELLGITIMERSSFEKNPIDFLEAKGYKEVKKDLIIKLPKY
SLFELENGRKRMLASAGELQKGNELALPSKYVNFLYLASHYEKLKGSPED
NEQKQLFVEQHKHYLDEIIEQISEFSKRVILADANLDKVLSAYNKHRDKP
IREQAENIIHLFTLTNLGAPAAFKYFDTTIDRKRYTSTKEVLDATLIHQS
ITGLYETRIDLSQLGGD

### Exemplary SpEQR Cas9

(SEQ ID NO: 39)

DKKYSIGLAIGTNSVGWAVITDEYKVPSKKFKVLGNTDRHSIKKNLIGAL
LFDSGETAEATRLKRTARRRYTRRKNRICYLQEIFSNEMAKVDDSFFHRL
EESFLVEEDKKHERHPIFGNIVDEVAYHEKYPTIYHLRKKLVDSTDKADL
RLIYLALAHMIKFRGHFLIEGDLNPDNSDVDKLFIQLVQTYNQLFEENPI
NASGVDAKAILSARLSKSRRLENLIAQLPGEKKNGLFGNLIALSLGLTPN
FKSNFDLAEDAKLQLSKDTYDDDLDNLLAQIGDQYADLFLAAKNLSDAIL
LSDILRVNTEITKAPLSASMIKRYDEHHQDLTLLKALVRQQLPEKYKEIF
FDQSKNGYAGYIDGGASQEEFYKFIKPILEKMDGTEELLVKLNREDLLRK
QRTFDNGSIPHQIHLGELHAILRRQEDFYPFLKDNREKIEKILTFRIPYY
VGPLARGNSRFAWMTRKSEETITPWNFEEVVDKGASAQSFIERMTNFDKN
LPNEKVLPKHSLLYEYFTVYNELTKVKYVTEGMRKPAFLSGEQKKAIVDL
LFKTNRKVTVKQLKEDYFKKIECFDSVEISGVEDRFNASLGTYHDLLKII
KDKDFLDNEENEDILEDIVLTLTLFEDREMIEERLKTYAHLFDDKVMKQL
KRRRYTGWGRLSRKLINGIRDKQSGKTILDFLKSDGFANRNFMQLIHDDS
LTFKEDIQKAQVSGQGDSLHEHIANLAGSPAIKKGILQTVKVVDELVKVM
GRHKPENIVIEMARENQTTQKGQKNSRERMKRIEEGIKELGSQILKEHPV
ENTQLQNEKLYLYYLQNGRDMYVDQELDINRLSDYDVDHIVPQSFLKDDS
IDNKVLTRSDKNRGKSDNVPSEEVVKKMKNYWRQLLNAKLITQRKFDNLT
KAERGGLSELDKAGFIKRQLVETRQITKHVAQILDSRMNTKYDENDKLIR
EVKVITLKSKLVSDFRKDFQFYKVREINNYHHAHDAYLNAVVGTALIKKY
PKLESEFVYGDYKVYDVRKMIAKSEQEIGKATAKYFFYSNIMNFFKTEIT
LANGEIRKRPLIETNGETGEIVWDKGRDFATVRKVLSMPQVNIVKKTEVQ
TGGFSKESILPKRNSDKLIARKKDWDPKKYGGFESPTVAYSVLVVAKVEK
GKSKKLKSVKELLGITIMERSSFEKNPIDFLEAKGYKEVKKDLIIKLPKY
SLFELENGRKRMLASAGELQKGNELALPSKYVNFLYLASHYEKLKGSPED
NEQKQLFVEQHKHYLDEIIEQISEFSKRVILADANLDKVLSAYNKHRDKP
IREQAENIIHLFTLTNLGAPAAFKYFDTTIDRKQYRSTKEVLDATLIHQS
ITGLYETRIDLSQLGGD

Residues E1134, Q1334, and R1336 of SEQ ID NO: 39, which can be mutated from D1134, R1334, and T1336 of SEQ ID NO: 39 to yield a SpEQR Cas9, are underlined and in bold.

### Exemplary SpVQR Cas9

(SEQ ID NO: 40)

DKKYSIGLAIGTNSVGWAVITDEYKVPSKKFKVLGNTDRHSIKKNLIGAL
LFDSGETAEATRLKRTARRRYTRRKNRICYLQEIFSNEMAKVDDSFFHRL
EESFLVEEDKKHERHPIFGNIVDEVAYHEKYPTIYHLRKKLVDSTDKADL
RLIYLALAHMIKFRGHFLIEGDLNPDNSDVDKLFIQLVQTYNQLFEENPI
NASGVDAKAILSARLSKSRRLENLIAQLPGEKKNGLFGNLIALSLGLTPN
FKSNFDLAEDAKLQLSKDTYDDDLDNLLAQIGDQYADLFLAAKNLSDAIL
LSDILRVNTEITKAPLSASMIKRYDEHHQDLTLLKALVRQQLPEKYKEIF
FDQSKNGYAGYIDGGASQEEFYKFIKPILEKMDGTEELLVKLNREDLLRK
QRTFDNGSIPHQIHLGELHAILRRQEDFYPFLKDNREKIEKILTFRIPYY
VGPLARGNSRFAWMTRKSEETITPWNFEEVVDKGASAQSFIERMTNFDKN
LPNEKVLPKHSLLYEYFTVYNELTKVKYVTEGMRKPAFLSGEQKKAIVDL
LFKTNRKVTVKQLKEDYFKKIECFDSVEISGVEDRFNASLGTYHDLLKII
KDKDFLDNEENEDILEDIVLTLTLFEDREMIEERLKTYAHLFDDKVMKQL
KRRRYTGWGRLSRKLINGIRDKQSGKTILDFLKSDGFANRNFMQLIHDDS
LTFKEDIQKAQVSGQGDSLHEHIANLAGSPAIKKGILQTVKVVDELVKVM
GRHKPENIVIEMARENQTTQKGQKNSRERMKRIEEGIKELGSQILKEHPV
ENTQLQNEKLYLYYLQNGRDMYVDQELDINRLSDYDVDHIVPQSFLKDDS
IDNKVLTRSDKNRGKSDNVPSEEVVKKMKNYWRQLLNAKLITQRKFDNLT
KAERGGLSELDKAGFIKRQLVETRQITKHVAQILDSRMNTKYDENDKLIR
EVKVITLKSKLVSDFRKDFQFYKVREINNYHHAHDAYLNAVVGTALIKKY
PKLESEFVYGDYKVYDVRKMIAKSEQEIGKATAKYFFYSNIMNFFKTEIT
LANGEIRKRPLIETNGETGEIVWDKGRDFATVRKVLSMPQVNIVKKTEVQ
TGGFSKESILPKRNSDKLIARKKDWDPKKYGGFVSPTVAYSVLVVAKVEK
GKSKKLKSVKELLGITIMERSSFEKNPIDFLEAKGYKEVKKDLIIKLPKY
SLFELENGRKRMLASAGELQKGNELALPSKYVNFLYLASHYEKLKGSPED
NEQKQLFVEQHKHYLDEIIEQISEFSKRVILADANLDKVLSAYNKHRDKP
IREQAENIIHLFTLTNLGAPAAFKYFDTTIDRKQYRSTKEVLDATLIHQS
ITGLYETRIDLSQLGGD

Residues V1134, Q1334, and R1336 of SEQ ID NO: 40, which can be mutated from D1134, R1334, and T1336 of SEQ ID NO: 40 to yield a SpVQR Cas9, are underlined and in bold.

### Exemplary SpVRER Cas9

(SEQ ID NO: 41)

DKKYSIGLAIGTNSVGWAVITDEYKVPSKKFKVLGNTDRHSIKKNLIGAL
LFDSGETAEATRLKRTARRRYTRRKNRICYLQEIFSNEMAKVDDSFFHRL
EESFLVEEDKKHERHPIFGNIVDEVAYHEKYPTIYHLRKKLVDSTDKADL
RLIYLALAHMIKFRGHFLIEGDLNPDNSDVDKLFIQLVQTYNQLFEENPI
NASGVDAKAILSARLSKSRRLENLIAQLPGEKKNGLFGNLIALSLGLTPN
FKSNFDLAEDAKLQLSKDTYDDDLDNLLAQIGDQYADLFLAAKNLSDAIL
LSDILRVNTEITKAPLSASMIKRYDEHHQDLTLLKALVRQQLPEKYKEIF
FDQSKNGYAGYIDGGASQEEFYKFIKPILEKMDGTEELLVKLNREDLLRK
QRTFDNGSIPHQIHLGELHAILRRQEDFYPFLKDNREKIEKILTFRIPYY
VGPLARGNSRFAWMTRKSEETITPWNFEEVVDKGASAQSFIERMTNFDKN
LPNEKVLPKHSLLYEYFTVYNELTKVKYVTEGMRKPAFLSGEQKKAIVDL
LFKTNRKVTVKQLKEDYFKKIECFDSVEISGVEDRFNASLGTYHDLLKII
KDKDFLDNEENEDILEDIVLTLTLFEDREMIEERLKTYAHLFDDKVMKQL
KRRRYTGWGRLSRKLINGIRDKQSGKTILDFLKSDGFANRNFMQLIHDDS
LTFKEDIQKAQVSGQGDSLHEHIANLAGSPAIKKGILQTVKVVDELVKVM
GRHKPENIVIEMARENQTTQKGQKNSRERMKRIEEGIKELGSQILKEHPV
ENTQLQNEKLYLYYLQNGRDMYVDQELDINRLSDYDVDHIVPQSFLKDDS
IDNKVLTRSDKNRGKSDNVPSEEVVKKMKNYWRQLLNAKLITQRKFDNLT
KAERGGLSELDKAGFIKRQLVETRQITKHVAQILDSRMNTKYDENDKLIR
EVKVITLKSKLVSDFRKDFQFYKVREINNYHHAHDAYLNAVVGTALIKKY
PKLESEFVYGDYKVYDVRKMIAKSEQEIGKATAKYFFYSNIMNFFKTEIT
LANGEIRKRPLIETNGETGEIVWDKGRDFATVRKVLSMPQVNIVKKTEVQ
TGGFSKESILPKRNSDKLIARKKDWDPKKYGGFVSPTVAYSVLVVAKVEK
GKSKKLKSVKELLGITIMERSSFEKNPIDFLEAKGYKEVKKDLIIKLPKY
SLFELENGRKRMLASARELQKGNELALPSKYVNFLYLASHYEKLKGSPED
NEQKQLFVEQHKHYLDEIIEQISEFSKRVILADANLDKVLSAYNKHRDKP
IREQAENIIHLFTLTNLGAPAAFKYFDTTIDRKEYRSTKEVLDATLIHQS
ITGLYETRIDLSQLGGD

Residues V1134, R1217, Q1334, and R1336 of SEQ ID NO: 41, which can be mutated from D1134, G1217, R1334, and T1336 of SEQ ID NO: 41 to yield a SpVRER Cas9, are underlined and in bold.

[0289] The following are exemplary fusion proteins (e.g., base editing proteins) capable of binding to a nucleic acid sequence having a non-canonical (e.g., a non-NGG) PAM sequence:

Exemplary SaBE3 (rAPOBEC1-XTEN-SaCas9n-UGI-NLS)

(SEQ ID NO: 42)

MSSETGPVAVDPTLRRRIEPHEFEVFFDPRELRKETCLLYEINWGGRHSI
WRHTSQNTNKHVEVNFIEKFTTERYFCPNTRCSITWFLSWSPCGECSRAI
TEFLSRYPHVTLFIYIARLYHHADPRNRQGLRDLISSGVTIQIMTEQESG
YCWRNFVNYSPSNEAHWPRYPHLWVRLYVLELYCIILGLPPCLNILRRKQ
PQLTFFTIALQSCHYQRLPPHILWATGLKSGSETPGTSESATPESKRNYI
LGLDIGITSVGYGIIDYETRDVIDAGVRLFKEANVENNEGRRSKRGARRL
KRRRRHRIQRVKKLLFDYNLLTDHSELSGINPYEARVKGLSQKLSEEEFS
AALLHLAKRRGVHNVNEVEEDTGNELSTKEQISRNSKALEEKYVAELQLE
RLKKDGEVRGSINRFKTSDYVKEAKQLLKVQKAYHQLDQSFIDTYIDLLE
TRRTYYEGPGEGSPFGWKDIKEWYEMLMGHCTYFPEELRSVKYAYNADLY
NALNDLNNLVITRDENEKLEYYEKFQIIENVFKQKKKPTLKQIAKEILVN
EEDIKGYRVTSTGKPEFTNLKVYHDIKDITARKEIIENAELLDQIAKILT
IYQSSEDIQEELTNLNSELTQEEIEQISNLKGYTGTHNLSLKAINLILDE
LWHTNDNQIAIFNRLKLVPKKVDLSQQKEIPTTLVDDFILSPVVKRSFIQ
SIKVINAIIKKYGLPNDIIIELAREKNSKDAQKMINEMQKRNRQTNERIE
EIIRTTGKENAKYLIEKIKLHDMQEGKCLYSLEAIPLEDLLNNPFNYEVD
HIIPRSVSFDNSFNNKVLVKQEEASKKGNRTPFQYLSSSDSKISYETFKK
HILNLAKGKGRISKTKKEYLLEERDINRFSVQKDFINRNLVDTRYATRGL
MNLLRSYFRVNNLDVKVKSINGGFTSFLRRKWKFKKERNKGYKHHAEDAL
IIANADFIFKEWKKLDKAKKVMENQMFEEKQAESMPEIETEQEYKEIFIT
PHQIKHIKDFKDYKYSHRVDKKPNRELINDTLYSTRKDDKGNTLIVNNLN
GLYDKDNDKLKKLINKSPEKLLMYHHDPQTYQKLKLIMEQYGDEKNPLYK
YYEETGNYLTKYSKKDNGPVIKKIKYYGNKLNAHLDITDDYPNSRNKVVK
LSLKPYRFDVYLDNGVYKFVTVKNLDVIKKENYYEVNSKCYEEAKKLKKI
SNQAEFIASFYNNDLIKINGELYRVIGVNNDLLNRIEVNMIDITYREYLE
NMNDKRPPRIIKTIASKTQSIKKYSTDILGNLYEVKSKKHPQIIKKGSGG
STNLSDIIEKETGKQLVIQESILMLPEEVEEVIGNKPESDILVHTAYDES
TDENVMLLTSDAPEYKPWALVIQDSNGENKIKMLSGGSPKKKRKV

Exemplary SaKKH-BE3 (rAPOBEC1-XTEN-SaCas9n-UGI-NLS)

(SEQ ID NO: 43)

MSSETGPVAVDPTLRRRIEPHEFEVFFDPRELRKETCLLYEINWGGRHSI
WRHTSQNTNKHVEVNFIEKFTTERYFCPNTRCSITWFLSWSPCGECSRAI
TEFLSRYPHVTLFIYIARLYHHADPRNRQGLRDLISSGVTIQIMTEQESG
YCWRNFVNYSPSNEAHWPRYPHLWVRLYVLELYCIILGLPPCLNILRRKQ
PQLTFFTIALQSCHYQRLPPHILWATGLKSGSETPGTSESATPESKRNYI
LGLDIGITSVGYGIIDYETRDVIDAGVRLFKEANVENNEGRRSKRGARRL
KRRRRHRIQRVKKLLFDYNLLTDHSELSGINPYEARVKGLSQKLSEEEFS
AALLHLAKRRGVHNVNEVEEDTGNELSTKEQISRNSKALEEKYVAELQLE
RLKKDGEVRGSINRFKTSDYVKEAKQLLKVQKAYHQLDQSFIDTYIDLLE
TRRTYYEGPGEGSPFGWKDIKEWYEMLMGHCTYFPEELRSVKYAYNADLY
NALNDLNNLVITRDENEKLEYYEKFQIIENVFKQKKKPTLKQIAKEILVN
EEDIKGYRVTSTGKPEFTNLKVYHDIKDITARKEIIENAELLDQIAKILT
IYQSSEDIQEELTNLNSELTQEEIEQISNLKGYTGTHNLSLKAINLILDE
LWHTNDNQIAIFNRLKLVPKKVDLSQQKEIPTTLVDDFILSPVVKRSFIQ
SIKVINAIIKKYGLPNDIIIELAREKNSKDAQKMINEMQKRNRQTNERIE
EIIRTTGKENAKYLIEKIKLHDMQEGKCLYSLEAIPLEDLLNNPFNYEVD
HIIPRSVSFDNSFNNKVLVKQEEASKKGNRTPFQYLSSSDSKISYETFKK
HILNLAKGKGRISKTKKEYLLEERDINRFSVQKDFINRNLVDTRYATRGL
MNLLRSYFRVNNLDVKVKSINGGFTSFLRRKWKFKKERNKGYKHHAEDAL
IIANADFIFKEWKKLDKAKKVMENQMFEEKQAESMPEIETEQEYKEIFIT
PHQIKHIKDFKDYKYSHRVDKKPNRKLINDTLYSTRKDDKGNTLIVNNLN
GLYDKDNDKLKKLINKSPEKLLMYHHDPQTYQKLKLIMEQYGDEKNPLYK
YYEETGNYLTKYSKKDNGPVIKKIKYYGNKLNAHLDITDDYPNSRNKVVK
LSLKPYRFDVYLDNGVYKFVTVKNLDVIKKENYYEVNSKCYEEAKKLKKI
SNQAEFIASFYKNDLIKINGELYRVIGVNNDLLNRIEVNMIDITYREYLE
NMNDKRPPHIIKTIASKTQSIKKYSTDILGNLYEVKSKKHPQIIKKGSGG
STNLSDIIEKETGKQLVIQESILMLPEEVEEVIGNKPESDILVHTAYDES
TDENVMLLTSDAPEYKPWALVIQDSNGENKIKMLSGGSPKKKRKV

Exemplary EQR-BE3 (rAPOBEC1-XTEN-Cas9n-UGI-NLS)

(SEQ ID NO: 44)

MSSETGPVAVDPTLRRRIEPHEFEVFFDPRELRKETCLLYEINWGGRHSI
WRHTSQNTNKHVEVNFIEKFTTERYFCPNTRCSITWFLSWSPCGECSRAI
TEFLSRYPHVTLFIYIARLYHHADPRNRQGLRDLISSGVTIQIMTEQESG
YCWRNFVNYSPSNEAHWPRYPHLWVRLYVLELYCIILGLPPCLNILRRKQ
PQLTFFTIALQSCHYQRLPPHILWATGLKSGSETPGTSESATPESDKKYS
IGLAIGTNSVGWAVITDEYKVPSKKFKVLGNTDRHSIKKNLIGALLFDSG
ETAEATRLKRTARRRYTRRKNRICYLQEIFSNEMAKVDDSFFHRLEESFL
VEEDKKHERHPIFGNIVDEVAYHEKYPTIYHLRKKLVDSTDKADLRLIYL
ALAHMIKFRGHFLIEGDLNPDNSDVDKLFIQLVQTYNQLFEENPINASGV
DAKAILSARLSKSRRLENLIAQLPGEKKNGLFGNLIALSLGLTPNFKSNF
DLAEDAKLQLSKDTYDDDLDNLLAQIGDQYADLFLAAKNLSDAILLSDIL
RVNTEITKAPLSASMIKRYDEHHQDLTLLKALVRQQLPEKYKEIFFDQSK
NGYAGYIDGGASQEEFYKFIKPILEKMDGTEELLVKLNREDLLRKQRTFD
NGSIPHQIHLGELHAILRRQEDFYPFLKDNREKIEKILTFRIPYYVGPLA
RGNSRFAWMTRKSEETITPWNFEEVVDKGASAQSFIERMTNFDKNLPNEK
VLPKHSLLYEYFTVYNELTKVKYVTEGMRKPAFLSGEQKKAIVDLLFKTN
RKVTVKQLKEDYFKKIECFDSVEISGVEDRFNASLGTYHDLLKIIKDKDF
LDNEENEDILEDIVLTLTLFEDREMIEERLKTYAHLFDDKVMKQLKRRRY
TGWGRLSRKLINGIRDKQSGKTILDFLKSDGFANRNFMQLIHDDSLTFKE
DIQKAQVSGQGDSLHEHIANLAGSPAIKKGILQTVKVVDELVKVMGRHKP
ENIVIEMARENQTTQKGQKNSRERMKRIEEGIKELGSQILKEHPVENTQL
QNEKLYLYYLQNGRDMYVDQELDINRLSDYDVDHIVPQSFLKDDSIDNKV
LTRSDKNRGKSDNVPSEEVVKKMKNYWRQLLNAKLITQRKFDNLTKAERG
GLSELDKAGFIKRQLVETRQITKHVAQILDSRMNTKYDENDKLIREVKVI
TLKSKLVSDFRKDFQFYKVREINNYHHAHDAYLNAVVGTALIKKYPKLES
EFVYGDYKVYDVRKMIAKSEQEIGKATAKYFFYSNIMNFFKTEITLANGE
IRKRPLIETNGETGEIVWDKGRDFATVRKVLSMPQVNIVKKTEVQTGGFS
KESILPKRNSDKLIARKKDWDPKKYGGFESPTVAYSVLVVAKVEKGKSKK
LKSVKELLGITIMERSSFEKNPIDFLEAKGYKEVKKDLIIKLPKYSLFEL
ENGRKRMLASAGELQKGNELALPSKYVNFLYLASHYEKLKGSPEDNEQKQ
LFVEQHKHYLDEIIEQISEFSKRVILADANLDKVLSAYNKHRDKPIREQA
ENIIHLFTLTNLGAPAAFKYFDTTIDRKQYRSTKEVLDATLIHQSITGLY
ETRIDLSQLGGDSGGSTNLSDIIEKETGKQLVIQESILMLPEEVEEVIGN
KPESDILVHTAYDESTDENVMLLTSDAPEYKPWALVIQDSNGENKIKMLS
GGSPKKKRKV

VQR-BE3 (rAPOBEC1-XTEN-Cas9n-UGI-NLS)

(SEQ ID NO: 45)

MSSETGPVAVDPTLRRRIEPHEFEVFFDPRELRKETCLLYEINWGGRHSI
WRHTSQNTNKHVEVNFIEKFTTERYFCPNTRCSITWFLSWSPCGECSRAI
TEFLSRYPHVTLFIYIARLYHHADPRNRQGLRDLISSGVTIQIMTEQESG
YCWRNFVNYSPSNEAHWPRYPHLWVRLYVLELYCIILGLPPCLNILRRKQ
PQLTFFTIALQSCHYQRLPPHILWATGLKSGSETPGTSESATPESDKKYS
IGLAIGTNSVGWAVITDEYKVPSKKFKVLGNTDRHSIKKNLIGALLFDSG
ETAEATRLKRTARRRYTRRKNRICYLQEIFSNEMAKVDDSFFHRLEESFL
VEEDKKHERHPIFGNIVDEVAYHEKYPTIYHLRKKLVDSTDKADLRLIYL
ALAHMIKFRGHFLIEGDLNPDNSDVDKLFIQLVQTYNQLFEENPINASGV
DAKAILSARLSKSRRLENLIAQLPGEKKNGLFGNLIALSLGLTPNFKSNF
DLAEDAKLQLSKDTYDDDLDNLLAQIGDQYADLFLAAKNLSDAILLSDIL
RVNTEITKAPLSASMIKRYDEHHQDLTLLKALVRQQLPEKYKEIFFDQSK
NGYAGYIDGGASQEEFYKFIKPILEKMDGTEELLVKLNREDLLRKQRTFD
NGSIPHQIHLGELHAILRRQEDFYPFLKDNREKIEKILTFRIPYYVGPLA
RGNSRFAWMTRKSEETITPWNFEEVVDKGASAQSFIERMTNFDKNLPNEK
VLPKHSLLYEYFTVYNELTKVKYVTEGMRKPAFLSGEQKKAIVDLLFKTN
RKVTVKQLKEDYFKKIECFDSVEISGVEDRFNASLGTYHDLLKIIKDKDF
LDNEENEDILEDIVLTLTLFEDREMIEERLKTYAHLFDDKVMKQLKRRRY
TGWGRLSRKLINGIRDKQSGKTILDFLKSDGFANRNFMQLIHDDSLTFKE
DIQKAQVSGQGDSLHEHIANLAGSPAIKKGILQTVKVVDELVKVMGRHKP
ENIVIEMARENQTTQKGQKNSRERMKRIEEGIKELGSQILKEHPVENTQL
QNEKLYLYYLQNGRDMYVDQELDINRLSDYDVDHIVPQSFLKDDSIDNKV
LTRSDKNRGKSDNVPSEEVVKKMKNYWRQLLNAKLITQRKFDNLTKAERG
GLSELDKAGFIKRQLVETRQITKHVAQILDSRMNTKYDENDKLIREVKVI
TLKSKLVSDFRKDFQFYKVREINNYHHAHDAYLNAVVGTALIKKYPKLES
EFVYGDYKVYDVRKMIAKSEQEIGKATAKYFFYSNIMNFFKTEITLANGE
IRKRPLIETNGETGEIVWDKGRDFATVRKVLSMPQVNIVKKTEVQTGGFS
KESILPKRNSDKLIARKKDWDPKKYGGFVSPTVAYSVLVVAKVEKGKSKK
LKSVKELLGITIMERSSFEKNPIDFLEAKGYKEVKKDLIIKLPKYSLFEL
ENGRKRMLASAGELQKGNELALPSKYVNFLYLASHYEKLKGSPEDNEQKQ
LFVEQHKHYLDEIIEQISEFSKRVILADANLDKVLSAYNKHRDKPIREQA
ENIIHLFTLTNLGAPAAFKYFDTTIDRKQYRSTKEVLDATLIHQSITGLY
ETRIDLSQLGGDSGGSTNLSDIIEKETGKQLVIQESILMLPEEVEEVIGN
KPESDILVHTAYDESTDENVMLLTSDAPEYKPWALVIQDSNGENKIKMLS
GGSPKKKRKV

VRER-BE3 (rAPOBEC1-XTEN-Cas9n-UGI-NLS)

(SEQ ID NO: 46)

MSSETGPVAVDPTLRRRIEPHEFEVFFDPRELRKETCLLYEINWGGRHSI
WRHTSQNTNKHVEVNFIEKFTTERYFCPNTRCSITWFLSWSPCGECSRAI
TEFLSRYPHVTLFIYIARLYHHADPRNRQGLRDLISSGVTIQIMTEQESG
YCWRNFVNYSPSNEAHWPRYPHLWVRLYVLELYCIILGLPPCLNILRRKQ
PQLTFFTIALQSCHYQRLPPHILWATGLKSGSETPGTSESATPESDKKYS
IGLAIGTNSVGWAVITDEYKVPSKKFKVLGNTDRHSIKKNLIGALLFDSG
ETAEATRLKRTARRRYTRRKNRICYLQEIFSNEMAKVDDSFFHRLEESFL
VEEDKKHERHPIFGNIVDEVAYHEKYPTIYHLRKKLVDSTDKADLRLIYL
ALAHMIKFRGHFLIEGDLNPDNSDVDKLFIQLVQTYNQLFEENPINASGV
DAKAILSARLSKSRRLENLIAQLPGEKKNGLFGNLIALSLGLTPNFKSNF
DLAEDAKLQLSKDTYDDDLDNLLAQIGDQYADLFLAAKNLSDAILLSDIL
RVNTEITKAPLSASMIKRYDEHHQDLTLLKALVRQQLPEKYKEIFFDQSK
NGYAGYIDGGASQEEFYKFIKPILEKMDGTEELLVKLNREDLLRKQRTFD
NGSIPHQIHLGELHAILRRQEDFYPFLKDNREKIEKILTFRIPYYVGPLA
RGNSRFAWMTRKSEETITPWNFEEVVDKGASAQSFIERMTNFDKNLPNEK
VLPKHSLLYEYFTVYNELTKVKYVTEGMRKPAFLSGEQKKAIVDLLFKTN
RKVTVKQLKEDYFKKIECFDSVEISGVEDRFNASLGTYHDLLKIIKDKDF
LDNEENEDILEDIVLTLTLFEDREMIEERLKTYAHLFDDKVMKQLKRRRY
TGWGRLSRKLINGIRDKQSGKTILDFLKSDGFANRNFMQLIHDDSLTFKE
DIQKAQVSGQGDSLHEHIANLAGSPAIKKGILQTVKVVDELVKVMGRHKP
ENIVIEMARENQTTQKGQKNSRERMKRIEEGIKELGSQILKEHPVENTQL
QNEKLYLYYLQNGRDMYVDQELDINRLSDYDVDHIVPQSFLKDDSIDNKV
LTRSDKNRGKSDNVPSEEVVKKMKNYWRQLLNAKLITQRKFDNLTKAERG
GLSELDKAGFIKRQLVETRQITKHVAQILDSRMNTKYDENDKLIREVKVI
TLKSKLVSDFRKDFQFYKVREINNYHHAHDAYLNAVVGTALIKKYPKLES
EFVYGDYKVYDVRKMIAKSEQEIGKATAKYFFYSNIMNFFKTEITLANGE
IRKRPLIETNGETGEIVWDKGRDFATVRKVLSMPQVNIVKKTEVQTGGFS
KESILPKRNSDKLIARKKDWDPKKYGGFVSPTVAYSVLVVAKVEKGKSKK
LKSVKELLGITIMERSSFEKNPIDFLEAKGYKEVKKDLIIKLPKYSLFEL
ENGRKRMLASARELQKGNELALPSKYVNFLYLASHYEKLKGSPEDNEQKQ
LFVEQHKHYLDEIIEQISEFSKRVILADANLDKVLSAYNKHRDKPIREQA
ENIIHLFTLTNLGAPAAFKYFDTTIDRKEYRSTKEVLDATLIHQSITGLY
ETRIDLSQLGGDSGGSTNLSDIIEKETGKQLVIQESILMLPEEVEEVIGN
KPESDILVHTAYDESTDENVMLLTSDAPEYKPWALVIQDSNGENKIKMLS
GGSPKKKRKV

### High Fidelity Base Editors

[0290] Some aspects of the disclosure provide Cas9 fusion proteins (e.g., any of the fusion proteins provided herein) comprising a Cas9 domain that has high fidelity. Additional aspects of the disclosure provide Cas9 fusion proteins (e.g., any of the fusion proteins provided herein) comprising a Cas9 domain with decreased electrostatic interactions between the Cas9 domain and a sugar-phosphate backbone of a DNA, as compared to a wild-type Cas9 domain. In some embodiments, a Cas9 domain (e.g., a wild type Cas9 domain) comprises one or more mutations that decreases the association between the Cas9 domain and a sugar-phosphate backbone of a DNA. In some embodiments, any of the Cas9 fusion proteins provided herein comprise one or more of a N497X, a R661X, a Q695X, and/or a Q926X mutation of the amino acid sequence provided in SEQ ID NO: 6, or a corresponding mutation in any Cas9 protein, such as any one of the Cas9 amino acid sequences as provided herein, wherein X is any amino acid. In some embodiments, any of the Cas9 fusion proteins provided herein comprise one or more of a N497A, a R661A, a Q695A, and/or a Q926A mutation of the amino acid sequence provided in SEQ ID NO: 6, or a corresponding mutation in any Cas9 protein, such as any one of the Cas9 amino acid sequences as provided herein. In some embodiments, the Cas9 domain comprises a D10A mutation of the amino acid sequence provided in SEQ ID NO: 6, or a corresponding mutation in any Cas9 protein, such as any one of the Cas9 amino acid sequences as provided herein. In some embodiments, the Cas9 domain (e.g., of any of the fusion proteins provided herein) comprises the amino acid sequence as set forth in SEQ ID NO: 47. In some embodiments, the fusion protein comprises the amino acid sequence as set forth in SEQ ID NO: 48. Cas9 domains with high fidelity are known in the art and would be apparent to the skilled artisan. For example, Cas9 domains with high fidelity have been described in Kleinstiver, B. P., et al. “High-fidelity CRISPR-Cas9 nucleases with no detectable genome-wide off-target effects.” Nature 529, 490-495 (2016); and Slaymaker, I. M., et al. “Rationally engineered Cas9 nucleases with improved specificity.” Science 351, 84-88 (2015); the entire contents of each are incorporated herein by reference.

[0291] It should be appreciated that the base editors provided herein, for example, base editor 2 (BE2) or base editor 3 (BE3), may be converted into high fidelity base editors by modifying the Cas9 domain as described herein to generate high fidelity base editors, for example, high fidelity base editor 2 (HF-BE2) or high fidelity base editor 3 (HF-BE3). In some embodiments, base editor 2 (BE2) comprises a deaminase domain, a dCas9, and a UGI domain. In some embodiments, base editor 3 (BE3) comprises a deaminase domain, anCas9 domain and a UGI domain.

Cas9 Domain where Mutations Relative to Cas9 of SEQ ID NO: 6 are Shown in Bold and Underlines

(SEQ ID NO: 47)

DKKYSIGLAIGTNSVGWAVITDEYKVPSKKFKVLGNTDRHSIKKNLIGAL
LFDSGETAEATRLKRTARRRYTRRKNRICYLQEIFSNEMAKVDDSFFHRL
EESFLVEEDKKHERHPIFGNIVDEVAYHEKYPTIYHLRKKLVDSTDKADL
RLIYLALAHMIKFRGHFLIEGDLNPDNSDVDKLFIQLVQTYNQLFEENPI
NASGVDAKAILSARLSKSRRLENLIAQLPGEKKNGLFGNLIALSLGLTPN
FKSNFDLAEDAKLQLSKDTYDDDLDNLLAQIGDQYADLFLAAKNLSDAIL
LSDILRVNTEITKAPLSASMIKRYDEHHQDLTLLKALVRQQLPEKYKEIF
FDQSKNGYAGYIDGGASQEEFYKFIKPILEKMDGTEELLVKLNREDLLRK
QRTFDNGSIPHQIHLGELHAILRRQEDFYPFLKDNREKIEKILTFRIPYY
VGPLARGNSRFAWMTRKSEETITPWNFEEVVDKGASAQSFIERMTAFDKN
LPNEKVLPKHSLLYEYFTVYNELTKVKYVTEGMRKPAFLSGEQKKAIVDL
LFKTNRKVTVKQLKEDYFKKIECFDSVEISGVEDRFNASLGTYHDLLKII
KDKDFLDNEENEDILEDIVLTLTLFEDREMIEERLKTYAHLFDDKVMKQL
KRRRYTGWGALSRKLINGIRDKQSGKTILDFLKSDGFANRNFMALIHDDS
LTFKEDIQKAQVSGQGDSLHEHIANLAGSPAIKKGILQTVKVVDELVKVM
GRHKPENIVIEMARENQTTQKGQKNSRERMKRIEEGIKELGSQILKEHPV
ENTQLQNEKLYLYYLQNGRDMYVDQELDINRLSDYDVDHIVPQSFLKDDS
IDNKVLTRSDKNRGKSDNVPSEEVVKKMKNYWRQLLNAKLITQRKFDNLT
KAERGGLSELDKAGFIKRQLVETRAITKHVAQILDSRMNTKYDENDKLIR
EVKVITLKSKLVSDFRKDFQFYKVREINNYHHAHDAYLNAVVGTALIKKY
PKLESEFVYGDYKVYDVRKMIAKSEQEIGKATAKYFFYSNIMNFFKTEIT
LANGEIRKRPLIETNGETGEIVWDKGRDFATVRKVLSMPQVNIVKKTEVQ
TGGFSKESILPKRNSDKLIARKKDWDPKKYGGFDSPTVAYSVLVVAKVEK
GKSKKLKSVKELLGITIMERSSFEKNPIDFLEAKGYKEVKKDLIIKLPKY
SLFELENGRKRMLASAGELQKGNELALPSKYVNFLYLASHYEKLKGSPED
NEQKQLFVEQHKHYLDEIIEQISEFSKRVILADANLDKVLSAYNKHRDKP
IREQAENIIHLFTLTNLGAPAAFKYFDTTIDRKRYTSTKEVLDATLIHQS
ITGLYETRIDLSQLGGD

### HF-BE3

(SEQ ID NO: 48)

MSSETGPVAVDPTLRRRIEPHEFEVFFDPRELRKETCLLYEINWGGRHSI
WRHTSQNTNKHVEVNFIEKFTTERYFCPNTRCSITWFLSWSPCGECSRAI
TEFLSRYPHVTLFIYIARLYHHADPRNRQGLRDLISSGVTIQIMTEQESG
YCWRNFVNYSPSNEAHWPRYPHLWVRLYVLELYCIILGLPPCLNILRRKQ
PQLTFFTIALQSCHYQRLPPHILWATGLKSGSETPGTSESATPESDKKYS
IGLAIGTNSVGWAVITDEYKVPSKKFKVLGNTDRHSIKKNLIGALLFDSG
ETAEATRLKRTARRRYTRRKNRICYLQEIFSNEMAKVDDSFFHRLEESFL
VEEDKKHERHPIFGNIVDEVAYHEKYPTIYHLRKKLVDSTDKADLRLIYL
ALAHMIKFRGHFLIEGDLNPDNSDVDKLFIQLVQTYNQLFEENPINASGV
DAKAILSARLSKSRRLENLIAQLPGEKKNGLFGNLIALSLGLTPNFKSNF
DLAEDAKLQLSKDTYDDDLDNLLAQIGDQYADLFLAAKNLSDAILLSDIL
RVNTEITKAPLSASMIKRYDEHHQDLTLLKALVRQQLPEKYKEIFFDQSK
NGYAGYIDGGASQEEFYKFIKPILEKMDGTEELLVKLNREDLLRKQRTFD
NGSIPHQIHLGELHAILRRQEDFYPFLKDNREKIEKILTFRIPYYVGPLA
RGNSRFAWMTRKSEETITPWNFEEVVDKGASAQSFIERMTAFDKNLPNEK
VLPKHSLLYEYFTVYNELTKVKYVTEGMRKPAFLSGEQKKAIVDLLFKTN
RKVTVKQLKEDYFKKIECFDSVEISGVEDRFNASLGTYHDLLKIIKDKDF
LDNEENEDILEDIVLTLTLFEDREMIEERLKTYAHLFDDKVMKQLKRRRY
TGWGALSRKLINGIRDKQSGKTILDFLKSDGFANRNFMALIHDDSLTFKE
DIQKAQVSGQGDSLHEHIANLAGSPAIKKGILQTVKVVDELVKVMGRHKP
ENIVIEMARENQTTQKGQKNSRERMKRIEEGIKELGSQILKEHPVENTQL
QNEKLYLYYLQNGRDMYVDQELDINRLSDYDVDHIVPQSFLKDDSIDNKV
LTRSDKNRGKSDNVPSEEVVKKMKNYWRQLLNAKLITQRKFDNLTKAERG
GLSELDKAGFIKRQLVETRAITKHVAQILDSRMNTKYDENDKLIREVKVI
TLKSKLVSDFRKDFQFYKVREINNYHHAHDAYLNAVVGTALIKKYPKLES
EFVYGDYKVYDVRKMIAKSEQEIGKATAKYFFYSNIMNFFKTEITLANGE
IRKRPLIETNGETGEIVWDKGRDFATVRKVLSMPQVNIVKKTEVQTGGFS
KESILPKRNSDKLIARKKDWDPKKYGGFDSPTVAYSVLVVAKVEKGKSKK
LKSVKELLGITIMERSSFEKNPIDFLEAKGYKEVKKDLIIKLPKYSLFEL
ENGRKRMLASAGELQKGNELALPSKYVNFLYLASHYEKLKGSPEDNEQKQ
LFVEQHKHYLDEIIEQISEFSKRVILADANLDKVLSAYNKHRDKPIREQA
ENIIHLFTLTNLGAPAAFKYFDTTIDRKRYTSTKEVLDATLIHQSITGLY
ETRIDLSQLGGD

### Cas9 Fusion Proteins

[0293] Any of the Cas9 domains (e.g., a nuclease active Cas9 protein, a nuclease-inactive dCas9 protein, or a Cas9 nickase protein) disclosed herein may be fused to a second protein, thus fusion proteins provided herein comprise a Cas9 domain as provided herein and a second protein, or a “fusion partner”. In some embodiments, the second protein is fused to the N-terminus of the Cas9 domain. However, in other embodiments, the second protein is fused to the C-terminus of the Cas9 domain. In some embodiments, the second protein that is fused to the Cas9 domain is a nucleic acid editing domain. In some embodiments, the Cas9 domain and the nucleic acid editing domain are fused via a linker, while in other embodiments the Cas9 domain and the nucleic acid editing domain are fused directly to one another. In some embodiments, the Cas9 domain and the nucleic acid editing domain are fused via a linker of any length or composition. For example, the linker may be a bond, one or more amino acids, a peptide, or a polymer, of any length and composition. In some embodiments, the linker comprises (GGGS)ₙ (SEQ ID NO: 613), (GGGGS)ₙ (SEQ ID NO: 607), (G)ₙ (SEQ ID NO: 608), (EAAAK)ₙ (SEQ ID NO: 609), (GGS)ₙ (SEQ ID NO: 610), (SGGS)ₙ (SEQ ID NO: 606), SGSETPGTSESATPES (SEQ ID NO: 604), SGGS(GGS)ₙ (SEQ ID NO: 612), SGGSSGGSSGSETPGTSESATPESSGGSSGGS (SEQ ID NO: 605), or (XP)ₙ (SEQ ID NO: 611) motif, or a combination of any of these, wherein n is independently an integer between 1 and 30, and wherein X is any amino acid. In some embodiments, the linker comprises a (GGS)ₙ motif, wherein n is 1, 3, or 7. In some embodiments, the linker comprises a (GGS)ₙ (SEQ ID NO: 610) motif, wherein n is 1, 2, 3, 4, 5, 6, 7, 8, 9, 10, 11, 12, 13, 14, or 15. In some embodiments, the linker comprises the amino acid sequence SGGS(GGS)ₙ (SEQ ID NO: 612), wherein n is 1, 2, 3, 4, 5, 6, 7, 8, 9, or 10. In some embodiments, the linker comprises the amino acid sequence SGGS(GGS)ₙ (SEQ ID NO: 612), wherein n is 2. In some embodiments, the linker comprises an amino acid sequence of SGSETPGTSESATPES (SEQ ID NO: 604), also referred to as the XTEN linker in the Examples). In some embodiments, the linker comprises the amino acid sequence SGGSSGGSSGSETPGTSESATPESSGGSSGGS (SEQ ID NO: 605), also referred to as the 32 amino acid linker in the Examples. The length of the linker can influence the base to be edited, as illustrated in the Examples. For example, a linker of 3-amino-acid long (e.g., (GGS)₁) may give a 2-5, 2-4, 2-3, 3-4 base editing window relative to the PAM sequence, while a 9-amino-acid linker (e.g., (GGS)₃ (SEQ ID NO: 610)) may give a 2-6, 2-5, 2-4, 2-3, 3-6, 3-5, 3-4, 4-6, 4-5, 5-6 base editing window relative to the PAM sequence. A 16-amino-acid linker (e.g., the XTEN linker) may give a 2-7, 2-6, 2-5, 2-4, 2-3, 3-7, 3-6, 3-5, 3-4, 4-7, 4-6, 4-5, 5-7, 5-6, 6-7 base window relative to the PAM sequence with exceptionally strong activity, and a 21-amino-acid linker (e.g., (GGS)₇ (SEQ ID NO: 610)) may give a 3-8, 3-7, 3-6, 3-5, 3-4, 4-8, 4-7, 4-6, 4-5, 5-8, 5-7, 5-6, 6-8, 6-7, 7-8 base editing window relative to the PAM sequence. The novel finding that varying linker length may allow the dCas9 fusion proteins of the disclosure to edit nucleobases different distances from the PAM sequence affords siginicant clinical importance, since a PAM sequence may be of varying distance to the disease-causing mutation to be corrected in a gene. It is to be understood that the linker lengths described as examples here are not meant to be limiting.

[0294] In some embodiments, the second protein comprises an enzymatic domain. In some embodiments, the enzymatic domain is a nucleic acid editing domain. Such a nucleic acid editing domain may be, without limitation, a nuclease, a nickase, a recombinase, a deaminase, a methyltransferase, a methylase, an acetylase, or an acetyltransferase. Non-limiting exemplary binding domains that may be used in accordance with this disclosure include transcriptional activator domains and transcriptional repressor domains.

### Deaminase Domains

[0295] In some embodiments, second protein comprises a nucleic acid editing domain. In some embodiments, the nucleic acid editing domain can catalyze a C to U base change. In some embodiments, the nucleic acid editing domain is a deaminase domain. In some embodiments, the deaminase is a cytidine deaminase or a cytidine deaminase. In some embodiments, the deaminase is an apolipoprotein B mRNA-editing complex (APOBEC) family deaminase. In some embodiments, the deaminase is an APOBEC1 deaminase. In some embodiments, the deaminase is an APOBEC2 deaminase. In some embodiments, the deaminase is an APOBEC3 deaminase. In some embodiments, the deaminase is an APOBEC3A deaminase. In some embodiments, the deaminase is an APOBEC3B deaminase. In some embodiments, the deaminase is an APOBEC3C deaminase. In some embodiments, the deaminase is an APOBEC3D deaminase. In some embodiments, the deaminase is an APOBEC3E deaminase. In some embodiments, the deaminase is an APOBEC3F deaminase. In some embodiments, the deaminase is an APOBEC3G deaminase. In some embodiments, the deaminase is an APOBEC3H deaminase. In some embodiments, the deaminase is an APOBEC4 deaminase. In some embodiments, the deaminase is an activation-induced deaminase (AID). In some embodiments, the deaminase is a vertebrate deaminase. In some embodiments, the deaminase is an invertebrate deaminase. In some embodiments, the deaminase is a human, chimpanzee, gorilla, monkey, cow, dog, rat, or mouse deaminase. In some embodiments, the deaminase is a human deaminase. In some embodiments, the deaminase is a rat deaminase, e.g., rAPOBEC1. In some embodiments, the deaminase is an activation-induced cytidine deaminase (AID). In some embodiments, the deaminase is a cytidine deaminase 1 (CDA1). In some embodiments, the deaminase is a Petromyzon marinus cytidine deaminase 1 (pmCDA1). In some embodiments, the deminase is a human APOBEC3G (SEQ ID NO: 60). In some embodiments, the deaminase is a fragment of the human APOBEC3G (SEQ ID NO: 83). In some embodiments, the deaminase is a human APOBEC3G variant comprising a D316R_D317R mutation (SEQ ID NO: 82). In some embodiments, the deaminase is a frantment of the human APOBEC3G and comprising mutations corresponding to the D316R_D317R mutations in SEQ ID NO: 60 (SEQ ID NO: 84).

[0296] In some embodiments, the nucleic acid editing domain is at least 80%, at least 85%, at least 90%, at least 92%, at least 95%, at least 96%, at least 97%, at least 98%, at least 99%, or at least 99.5% identical to the deaminase domain of any one of SEQ ID NOs: 49-84. In some embodiments, the nucleic acid editing domain comprises the amino acid sequence of any one of SEQ ID NOs: 49-84.

Deaminase Domains that Modulate the Editing Window of Base Editors

[0297] Some aspects of the disclosure are based on the recognition that modulating the deaminase domain catalytic activity of any of the fusion proteins provided herein, for example by making point mutations in the deaminase domain, affect the processivity of the fusion proteins (e.g., base editors). For example, mutations that reduce, but do not eliminate, the catalytic activity of a deaminase domain within a base editing fusion protein can make it less likely that the deaminase domain will catalyze the deamination of a residue adjacent to a target residue, thereby narrowing the deamination window. The ability to narrow the deaminataion window may prevent unwanted deamination of residues adjacent of specific target residues, which may decrease or prevent off-target effects.

[0298] In some embodiments, any of the fusion proteins provided herein comprise a deaminase domain (e.g., a cytidine deaminase domain) that has reduced catalytic deaminase activity. In some embodiments, any of the fusion proteins provided herein comprise a deaminase domain (e.g., a cytidine deaminase domain) that has a reduced catalytic deaminase activity as compared to an appropriate control. For example, the appropriate control may be the deaminase activity of the deaminase prior to introducing one or more mutations into the deaminase. In other embodiments, the appropriate control may be a wild-type deaminase. In some embodiments, the appropriate control is a wild-type apolipoprotein B mRNA-editing complex (APOBEC) family deaminase. In some embodiments, the appropriate control is an APOBEC1 deaminase, an APOBEC2 deaminase, an APOBEC3A deaminase, an APOBEC3B deaminase, an APOBEC3C deaminase, an APOBEC3D deaminase, an APOBEC3F deaminase, an APOBEC3G deaminase, or an APOBEC3H deaminase. In some embodiments, the appropriate control is an activation induced deaminase (AID). In some embodiments, the appropriate control is a cytidine deaminase 1 from Petromyzon marinus (pmCDA1). In some embodiments, the deaminse domain may be a deaminase domain that has at least 1%, at least 5%, at least 15%, at least 20%, at least 25%, at least 30%, at least 40%, at least 50%, at least 60%, at least 70%, at least 80%, at least 90%, or at least 95% less catalytic deaminase activity as compared to an appropriate control.

[0299] In some embodiments, any of the fusion proteins provided herein comprise an APOBEC deaminase comprising one or more mutations selected from the group consisting of H121X, H122X, R126X, R126X, R118X, W90X, W90X, and R132X of rAPOBEC1 (SEQ ID NO: 76), or one or more corresponding mutations in another APOBEC deaminase, wherein X is any amino acid. In some embodiments, any of the fusion proteins provided herein comprise an APOBEC deaminase comprising one or more mutations selected from the group consisting of H121R, H122R, R126A, R126E, R118A, W90A, W90Y, and R132E of rAPOBEC1 (SEQ ID NO: 76), or one or more corresponding mutations in another APOBEC deaminase.

[0300] In some embodiments, any of the fusion proteins provided herein comprise an APOBEC deaminase comprising one or more mutations selected from the group consisting of D316X, D317X, R320X, R320X, R313X, W285X, W285X, R326X of hAPOBEC3G (SEQ ID NO: 60), or one or more corresponding mutations in another APOBEC deaminase, wherein X is any amino acid. In some embodiments, any of the fusion proteins provided herein comprise an APOBEC deaminase comprising one or more mutations selected from the group consisting of D316R, D317R, R320A, R320E, R313A, W285A, W285Y, R326E of hAPOBEC3G (SEQ ID NO: 60), or one or more corresponding mutations in another APOBEC deaminase.

[0301] In some embodiments, any of the fusion proteins provided herein comprise an APOBEC deaminase comprising a H121R and a H122Rmutation of rAPOBEC1 (SEQ ID NO: 76), or one or more corresponding mutations in another APOBEC deaminase. In some embodiments, any of the fusion proteins provided herein comprise an APOBEC deaminase comprising a R126A mutation of rAPOBEC1 (SEQ ID NO: 76), or one or more corresponding mutations in another APOBEC deaminase. In some embodiments, any of the fusion proteins provided herein comprise an APOBEC deaminase comprising a R126E mutation of rAPOBEC1 (SEQ ID NO: 76), or one or more corresponding mutations in another APOBEC deaminase. In some embodiments, any of the fusion proteins provided herein comprise an APOBEC deaminase comprising a R118A mutation of rAPOBEC1 (SEQ ID NO: 76), or one or more corresponding mutations in another APOBEC deaminase. In some embodiments, any of the fusion proteins provided herein comprise an APOBEC deaminase comprising a W90A mutation of rAPOBEC1 (SEQ ID NO: 76), or one or more corresponding mutations in another APOBEC deaminase. In some embodiments, any of the fusion proteins provided herein comprise an APOBEC deaminase comprising a W90Y mutation of rAPOBEC1 (SEQ ID NO: 76), or one or more corresponding mutations in another APOBEC deaminase. In some embodiments, any of the fusion proteins provided herein comprise an APOBEC deaminase comprising a R132E mutation of rAPOBEC1 (SEQ ID NO: 76), or one or more corresponding mutations in another APOBEC deaminase. In some embodiments, any of the fusion proteins provided herein comprise an APOBEC deaminase comprising a W90Y and a R126E mutation of rAPOBEC1 (SEQ ID NO: 76), or one or more corresponding mutations in another APOBEC deaminase. In some embodiments, any of the fusion proteins provided herein comprise an APOBEC deaminase comprising a R126E and a R132E mutation of rAPOBEC1 (SEQ ID NO: 76), or one or more corresponding mutations in another APOBEC deaminase. In some embodiments, any of the fusion proteins provided herein comprise an APOBEC deaminase comprising a W90Y and a R132E mutation of rAPOBEC1 (SEQ ID NO: 76), or one or more corresponding mutations in another APOBEC deaminase. In some embodiments, any of the fusion proteins provided herein comprise an APOBEC deaminase comprising a W90Y, R126E, and R132E mutation of rAPOBEC1 (SEQ ID NO: 76), or one or more corresponding mutations in another APOBEC deaminase.

[0302] In some embodiments, any of the fusion proteins provided herein comprise an APOBEC deaminase comprising a D316R and a D317R mutation of hAPOBEC3G (SEQ ID NO: 60), or one or more corresponding mutations in another APOBEC deaminase. In some embodiments, any of the fusion proteins provided herein comprise an APOBEC deaminase comprising a R320A mutation of hAPOBEC3G (SEQ ID NO: 60), or one or more corresponding mutations in another APOBEC deaminase. In some embodiments, any of the fusion proteins provided herein comprise an APOBEC deaminase comprising a R320E mutation of hAPOBEC3G (SEQ ID NO: 60), or one or more corresponding mutations in another APOBEC deaminase. In some embodiments, any of the fusion proteins provided herein comprise an APOBEC deaminase comprising a R313A mutation of hAPOBEC3G (SEQ ID NO: 60), or one or more corresponding mutations in another APOBEC deaminase. In some embodiments, any of the fusion proteins provided herein comprise an APOBEC deaminase comprising a W285A mutation of hAPOBEC3G (SEQ ID NO: 60), or one or more corresponding mutations in another APOBEC deaminase. In some embodiments, any of the fusion proteins provided herein comprise an APOBEC deaminase comprising a W285Y mutation of hAPOBEC3G (SEQ ID NO: 60), or one or more corresponding mutations in another APOBEC deaminase. In some embodiments, any of the fusion proteins provided herein comprise an APOBEC deaminase comprising a R326E mutation of hAPOBEC3G (SEQ ID NO: 60), or one or more corresponding mutations in another APOBEC deaminase. In some embodiments, any of the fusion proteins provided herein comprise an APOBEC deaminase comprising a W285Y and a R320E mutation of hAPOBEC3G (SEQ ID NO: 60), or one or more corresponding mutations in another APOBEC deaminase. In some embodiments, any of the fusion proteins provided herein comprise an APOBEC deaminase comprising a R320E and a R326E mutation of hAPOBEC3G (SEQ ID NO: 60), or one or more corresponding mutations in another APOBEC deaminase. In some embodiments, any of the fusion proteins provided herein comprise an APOBEC deaminase comprising a W285Y and a R326E mutation of hAPOBEC3G (SEQ ID NO: 60), or one or more corresponding mutations in another APOBEC deaminase. In some embodiments, any of the fusion proteins provided herein comprise an APOBEC deaminase comprising a W285Y, R320E, and R326E mutation of hAPOBEC3G (SEQ ID NO: 60), or one or more corresponding mutations in another APOBEC deaminase.

[0303] Some aspects of this disclosure provide fusion proteins comprising (i) a nuclease-inactive Cas9 domain; and (ii) a nucleic acid editing domain. In some embodiments, a nuclease-inactive Cas9 domain (dCas9), comprises an amino acid sequence that is at least 80%, at least 85%, at least 90%, at least 92%, at least 95%, at least 96%, at least 97%, at least 98%, at least 99%, or at least 99.5% identical to the amino acid sequence of a Cas9 as provided by any Cas9 protein, such as any one of the Cas9 amino acid sequences as provided herein, and comprises mutations that inactivate the nuclease activity of Cas9. Mutations that render the nuclease domains of Cas9 inactive are well-known in the art. For example, the DNA cleavage domain of Cas9 is known to include two subdomains, the HNH nuclease subdomain and the RuvC1 subdomain. The HNH subdomain cleaves the strand complementary to the gRNA, whereas the RuvC1 subdomain cleaves the non-complementary strand. Mutations within these subdomains can silence the nuclease activity of Cas9. For example, the mutations D10A and H840A completely inactivate the nuclease activity of S. pyogenes Cas9 (Jinek et al., Science. 337:816-821(2012); Qi et al., Cell. 28; 152(5):1173-83 (2013)). In some embodiments, the dCas9 of this disclosure comprises a D10A mutation of the amino acid sequence provided in SEQ ID NO: 6, or a corresponding mutation in any Cas9 protein, such as any one of the Cas9 amino acid sequences as provided herein. In some embodiments, the dCas9 of this disclosure comprises a H840A mutation of the amino acid sequence provided in SEQ ID NO: 6, or a corresponding mutation in any Cas9 protein, such as any one of the Cas9 amino acid sequences as provided herein. In some embodiments, the dCas9 of this disclosure comprises both D10A and H840A mutations of the amino acid sequence provided in SEQ ID NO: 6, or a corresponding mutation in any Cas9 protein, such as any one of the Cas9 amino acid sequences as provided herein. In some embodiments, the Cas9 further comprises a histidine residue at position 840 of the amino acid sequence provided in SEQ ID NO: 6, or a corresponding mutation in any Cas9 protein, such as any one of the Cas9 amino acid sequences as provided herein. The presence of the catalytic residue H840 restores the acvitity of the Cas9 to cleave the non-edited strand containing a G opposite the targeted C. Restoration of H840 does not result in the cleavage of the target strand containing the C. In some embodiments, the dCas9 comprises an amino acid sequence of SEQ ID NO: 32. It is to be understood that other mutations that inactivate the nuclease domains of Cas9 may also be included in the dCas9 of this disclosure.

[0304] The Cas9 or dCas9 domains comprising the mutations disclosed herein, may be a full-length Cas9, or a fragment thereof. In some embodiments, proteins comprising Cas9, or fragments thereof, are referred to as “Cas9 variants.” A Cas9 variant shares homology to Cas9, or a fragment thereof. For example a Cas9 variant is at least about 70% identical, at least about 80% identical, at least about 90% identical, at least about 95% identical, at least about 96% identical, at least about 97% identical, at least about 98% identical, at least about 99% identical, at least about 99.5% identical, or at least about 99.9% to wild type Cas9. In some embodiments, the Cas9 variant comprises a fragment of Cas9 (e.g., a gRNA binding domain or a DNA-cleavage domain), such that the fragment is at least about 70% identical, at least about 80% identical, at least about 90% identical, at least about 95% identical, at least about 96% identical, at least about 97% identical, at least about 98% identical, at least about 99% identical, at least about 99.5% identical, or at least about 99.9% identical to the corresponding fragment of wild type Cas9, e.g., a Cas9 comprising the amino acid sequence of SEQ ID NO: 6.

[0305] Any of the Cas9 fusion proteins of this disclosure may further comprise a nucleic acid editing domain (e.g., an enzyme that is capable of modifying nucleic acid, such as a deaminase). In some embodiments, the nucleic acid editing domain is a DNA-editing domain. In some embodiments, the nucleic acid editing domain has deaminase activity. In some embodiments, the nucleic acid editing domain comprises or consists of a deaminase or deaminase domain. In some embodiments, the deaminase is a cytidine deaminase. In some embodiments, the deaminase is an apolipoprotein B mRNA-editing complex (APOBEC) family deaminase. In some embodiments, the deaminase is an APOBEC1 family deaminase. In some embodiments, the deaminase is an activation-induced cytidine deaminase (AID). Some nucleic-acid editing domains as well as Cas9 fusion proteins including such domains are described in detail herein. Additional suitable nucleic acid editing domains will be apparent to the skilled artisan based on this disclosure and knowledge in the field.

[0306] Some aspects of the disclosure provide a fusion protein comprising a Cas9 domain fused to a nucleic acid editing domain, wherein the nucleic acid editing domain is fused to the N-terminus of the Cas9 domain. In some embodiments, the Cas9 domain and the nucleic acid editing-editing domain are fused via a linker. In some embodiments, the linker comprises a (GGGS)ₙ (SEQ ID NO: 613), a (GGGGS)ₙ (SEQ ID NO: 607), a (G)ₙ (SEQ ID NO: 608), an (EAAAK)ₙ (SEQ ID NO: 609), a (GGS)ₙ (SEQ ID NO: 610), (SGGS)ₙ (SEQ ID NO: 606), an SGSETPGTSESATPES (SEQ ID NO: 604) motif (see, e.g., Guilinger J P, Thompson D B, Liu D R. Fusion of catalytically inactive Cas9 to FokI nuclease improves the specificity of genome modification. Nat. Biotechnol. 2014; 32(6): 577-82; the entire contents are incorporated herein by reference), or an (XP)ₙ (SEQ ID NO: 611) motif, or a combination of any of these, wherein n is independently an integer between 1 and 30. In some embodiments, n is independently 1, 2, 3, 4, 5, 6, 7, 8, 9, 10, 11, 12, 13, 14, 15, 16, 17, 18, 19, 20, 21, 22, 23, 24, 25, 26, 27, 28, 29, or 30, or, if more than one linker or more than one linker motif is present, any combination thereof. In some embodiments, the linker comprises a (GGS)ₙ (SEQ ID NO: 610) motif, wherein n is 1, 2, 3, 4, 5, 6, 7, 8, 9, 10, 11, 12, 13, 14 or 15. In some embodiments, the linker comprises a (GGS)ₙ (SEQ ID NO: 610) motif, wherein n is 1, 3, or 7. In some embodiments, the linker comprises the amino acid sequence SGSETPGTSESATPES (SEQ ID NO: 604). Additional suitable linker motifs and linker configurations will be apparent to those of skill in the art. In some embodiments, suitable linker motifs and configurations include those described in Chen et al., Fusion protein linkers: property, design and functionality. Adv Drug Deliv Rev. 2013; 65(10):1357-69, the entire contents of which are incorporated herein by reference. Additional suitable linker sequences will be apparent to those of skill in the art based on the instant disclosure. In some embodiments, the general architecture of exemplary Cas9 fusion proteins provided herein comprises the structure:

[NH₂]-[nucleic acid editing domain]-[Cas9]-[COOH] or

[NH₂]-[nucleic acid editing domain]-[linker]-[Cas9]-[COOH],

wherein NH₂ is the N-terminus of the fusion protein, and COOH is the C-terminus of the fusion protein.

[0307] The fusion proteins of the present disclosure may comprise one or more additional features. For example, in some embodiments, the fusion protein comprises a nuclear localization sequence (NLS). In some embodiments, the NLS of the fusion protein is localized between the nucleic acid editing domain and the Cas9 domain. In some embodiments, the NLS of the fusion protein is localized C-terminal to the Cas9 domain.

[0308] Other exemplary features that may be present are localization sequences, such as cytoplasmic localization sequences, export sequences, such as nuclear export sequences, or other localization sequences, as well as sequence tags that are useful for solubilization, purification, or detection of the fusion proteins. Suitable protein tags provided herein include, but are not limited to, biotin carboxylase carrier protein (BCCP) tags, myc-tags, calmodulin-tags, FLAG-tags, hemagglutinin (HA)-tags, polyhistidine tags, also referred to as histidine tags or His-tags, maltose binding protein (MBP)-tags, nus-tags, glutathione-S-transferase (GST)-tags, green fluorescent protein (GFP)-tags, thioredoxin-tags, S-tags, Softags (e.g., Softag 1, Softag 3), strep-tags, biotin ligase tags, FlAsH tags, V5 tags, and SBP-tags. Additional suitable sequences will be apparent to those of skill in the art. In some embodiments, the fusion protein comprises one or more His tags.

[0309] In some embodiments, the nucleic acid editing domain is a deaminase. For example, in some embodiments, the general architecture of exemplary Cas9 fusion proteins with a deaminase domain comprises the structure:

[NH₂]-[NLS]-[deaminase]-[Cas9]-[COOH],

[NH₂]-[Cas9]-[deaminase]-[COOH],

[NH₂]-[deaminase]-[Cas9]-[COOH], or

[NH₂]-[deaminase]-[Cas9]-[NLS]-[COOH];

wherein NLS is a nuclear localization sequence, NH₂ is the N-terminus of the fusion protein, and COOH is the C-terminus of the fusion protein. Nuclear localization sequences are known in the art and would be apparent to the skilled artisan. For example, NLS sequences are described in Plank et al., PCT/EP2000/011690, the contents of which are incorporated herein by reference for their disclosure of exemplary nuclear localization sequences. In some embodiments, a NLS comprises the amino acid sequence PKKKRKV (SEQ ID NO: 614) or MDSLLMNRRKFLYQFKNVRWAKGRRETYLC (SEQ ID NO: 615). In some embodiments, a linker is inserted between the Cas9 and the deaminase. In some embodiments, the NLS is located C-terminal of the Cas9 domain. In some embodiments, the NLS is located N-terminal of the Cas9 domain. In some embodiments, the NLS is located between the deaminase and the Cas9 domain. In some embodiments, the NLS is located N-terminal of the deaminase domain. In some embodiments, the NLS is located C-terminal of the deaminase domain.

[0310] One exemplary suitable type of nucleic acid editing domain is a cytidine deaminase, for example, of the APOBEC family. The apolipoprotein B mRNA-editing complex (APOBEC) family of cytidine deaminase enzymes encompasses eleven proteins that serve to initiate mutagenesis in a controlled and beneficial manner.²⁹ One family member, activation-induced cytidine deaminase (AID), is responsible for the maturation of antibodies by converting cytosines in ssDNA to uracils in a transcription-dependent, strand-biased fashion.³⁰ The apolipoprotein B editing complex 3 (APOBEC3) enzyme provides protection to human cells against a certain HIV-1 strain via the deamination of cytosines in reverse-transcribed viral ssDNA.³¹ These proteins all require a Zn²⁺-coordinating motif (His-X-Glu-X₂₃₋₂₆-Pro-Cys-X₂₋₄-Cys; SEQ ID NO: 616) and bound water molecule for catalytic activity. The Glu residue acts to activate the water molecule to a zinc hydroxide for nucleophilic attack in the deamination reaction. Each family member preferentially deaminates at its own particular “hotspot”, ranging from WRC (W is A or T, R is A or G) for hAID, to TTC for hAPOBEC3F.³² A recent crystal structure of the catalytic domain of APOBEC3G revealed a secondary structure comprised of a five-stranded β-sheet core flanked by six α-helices, which is believed to be conserved across the entire family.³³ The active center loops have been shown to be responsible for both ssDNA binding and in determining “hotspot” identity.³⁴ Overexpression of these enzymes has been linked to genomic instability and cancer, thus highlighting the importance of sequence-specific targeting.³⁵

[0311] Some aspects of this disclosure relate to the recognition that the activity of cytidine deaminase enzymes such as APOBEC enzymes can be directed to a specific site in genomic DNA. Without wishing to be bound by any particular theory, advantages of using Cas9 as a recognition agent include (1) the sequence specificity of Cas9 can be easily altered by simply changing the sgRNA sequence; and (2) Cas9 binds to its target sequence by denaturing the dsDNA, resulting in a stretch of DNA that is single-stranded and therefore a viable substrate for the deaminase. It should be understood that other catalytic domains, or catalytic domains from other deaminases, can also be used to generate fusion proteins with Cas9, and that the disclosure is not limited in this regard.

[0312] Some aspects of this disclosure are based on the recognition that Cas9:deaminase fusion proteins can efficiently deaminate nucleotides at positions 3-11 according to the numbering scheme in FIG. 3. In view of the results provided herein regarding the nucleotides that can be targeted by Cas9:deaminase fusion proteins, a person of skill in the art will be able to design suitable guide RNAs to target the fusion proteins to a target sequence that comprises a nucleotide to be deaminated.

[0313] In some embodiments, the deaminase domain and the Cas9 domain are fused to each other via a linker. Various linker lengths and flexibilities between the deaminase domain (e.g., AID) and the Cas9 domain can be employed (e.g., ranging from very flexible linkers of the form (GGGGS)ₙ (SEQ ID NO: 607), (GGS)ₙ (SEQ ID NO: 610), and (G)ₙ (SEQ ID NO: 608) to more rigid linkers of the form (EAAAK)ₙ (SEQ ID NO: 609), (SGGS)ₙ (SEQ ID NO: 606), SGSETPGTSESATPES (SEQ ID NO: 604) (see, e.g., Guilinger J P, Thompson D B, Liu D R. Fusion of catalytically inactive Cas9 to FokI nuclease improves the specificity of genome modification. Nat. Biotechnol. 2014; 32(6): 577-82; the entire contents are incorporated herein by reference) and (XP)ₙ (SEQ ID NO: 611))³⁶ in order to achieve the optimal length for deaminase activity for the specific application. In some embodiments, the linker comprises a (GGS)ₙ (SEQ ID NO: 610) motif, wherein n is 1, 3, or 7. In some embodiments, the linker comprises a (an SGSETPGTSESATPES (SEQ ID NO: 604) motif.

[0314] Some exemplary suitable nucleic-acid editing domains, e.g., deaminases and deaminase domains, that can be fused to Cas9 domains according to aspects of this disclosure are provided below. It should be understood that, in some embodiments, the active domain of the respective sequence can be used, e.g., the domain without a localizing signal (nuclear localization sequence, without nuclear export signal, cytoplasmic localizing signal).

[0315] Human AID:

(SEQ ID NO: 49)

[sequence omitted]

(underline: nuclear localization sequence; double underline: nuclear export signal)

[0316] Mouse AID:

(SEQ ID NO: 51)

MDSLLMKQKKFLYHFKNVRWAKGRHETYLCYVVKRRDSATSCSLDFGHLR
NKSGCHVELLFLRYISDWDLDPGRCYRVTWFTSWSPCYDCARHVAEFLRW
NPNLSLRIFTARLYFCEDRKAEPEGLRRLHRAGVQIGIMTFKDYFYCWNT
FVENRERTFKAWEGLHENSVRLTRQLRRILLPLYEVDDLRDAFRMLGF

(underline: nuclear localization sequence; double underline: nuclear export signal)

[0317] Dog AID:

(SEQ ID NO: 52)

MDSLLMKQRKFLYHFKNVRWAKGRHETYLCYVVKRRDSATSFSLDFGHLR
NKSGCHVELLFLRYISDWDLDPGRCYRVTWFTSWSPCYDCARHVADFLRG
YPNLSLRIFAARLYFCEDRKAEPEGLRRLHRAGVQIAIMTFKDYFYCWNT
FVENREKTFKAWEGLHENSVRLSRQLRRILLPLYEVDDLRDAFRTLGL

(underline: nuclear localization sequence; double underline: nuclear export signal)

[0318] Bovine AID:

(SEQ ID NO: 53)

MDSLLKKQRQFLYQFKNVRWAKGRHETYLCYVVKRRDSPTSFSLDFGHLR
NKAGCHVELLFLRYISDWDLDPGRCYRVTWFTSWSPCYDCARHVADFLRG
YPNLSLRIFTARLYFCDKERKAEPEGLRRLHRAGVQIAIMTFKDYFYCWN
TFVENHERTFKAWEGLHENSVRLSRQLRRILLPLYEVDDLRDAFRTLGL

(underline: nuclear localization sequence; double underline: nuclear export signal)

(SEQ ID NO: 54)

Rat:AID:MAVGSKPKAALVGPHWERERIWCFLCSTGLGTQQTGQTSRWL
RPAATQDPVSPPRSLLMKQRKFLYHFKNVRWAKGRHETYLCYVVKRRDSA
TSFSLDFGYLRNKSGCHVELLFLRYISDWDLDPGRCYRVTWFTSWSPCYD
CARHVADFLRGNPNLSLRIFTARLTGWGALPAGLMSPARPSDYFYCWNTF
VENHERTFKAWEGLHENSVRLSRRLRRILLPLYEVDDLRDAFRTLGL

(underline: nuclear localization sequence; double underline: nuclear export signal)

[0319] Mouse APOBEC-3:

(SEQ ID NO: 55)

MGPFCLGCSHRKCYSPIRNLISQETFKFHFKNLGYAKGRKDTFLCYEVTR
KDCDSPVSLHHGVFKNKDNIHAEICFLYWFHDKVLKVLSPREEFKITWYM
SWSPCFECAEQIVRFLATHHNLSLDIFSSRLYNVQDPETQQNLCRLVQEG
AQVAAMDLYEFKKCWKKFVDNGGRRFRPWKRLLTNFRYQDSKLQEILRPC
YIPVPSSSSSTLSNICLTKGLPETRFCVEGRRMDPLSEEEFYSQFYNQRV
KHLCYYHRMKPYLCYQLEQFNGQAPLKGCLLSEKGKQHAEILFLDKIRSM
ELSQVTITCYLTWSPCPNCAWQLAAFKRDRPDLILHIYTSRLYFHWKRPF
QKGLCSLWQSGILVDVMDLPQFTDCWTNFVNPKRPFWPWKGLEIISRRTQ
RRLRRIKESWGLQDLVNDFGNLQLGPPMS

(italic: nucleic acid editing domain)

[0320] Rat APOBEC-3:

(SEQ ID NO: 56)

MGPFCLGCSHRKCYSPIRNLISQETFKFHFKNLRYAIDRKDTFLCYEVTR
KDCDSPVSLHHGVFKNKDNIHAEICFLYWFHDKVLKVLSPREEFKITWYM
SWSPCFECAEQVLRFLATHHNLSLDIFSSRLYNIRDPENQQNLCRLVQEG
AQVAAMDLYEFKKCWKKFVDNGGRRFRPWKKLLTNFRYQDSKLQEILRPC
YIPVPSSSSSTLSNICLTKGLPETRFCVERRRVHLLSEEEFYSQFYNQRV
KHLCYYHGVKPYLCYQLEQFNGQAPLKGCLLSEKGKQHAEILFLDKIRSM
ELSQVIITCYLTWSPCPNCAWQLAAFKRDRPDLILHIYTSRLYFHWKRPF
QKGLCSLWQSGILVDVMDLPQFTDCWTNFVNPKRPFWPWKGLEIISRRTQ
RRLHRIKESWGLQDLVNDFGNLQLGPPMS

(italic: nucleic acid editing domain)

[0321] Rhesus macaque APOBEC-3G:

(SEQ ID NO: 57)

MVEPMDPRTFVSNFNNRPILSGLNTVWLCCEVKTKDPSGPPLDAKIFQGK
VYSKAKYHPEMRFLRWFHKWRQLHHDQEYKVTWYVSWSPCTRCANSVATF
LAKDPKVTLTIFVARLYYFWKPDYQQALRILCQKRGGPHATMKIMNYNEF
QDCWNKFVDGRGKPFKPRNNLPKHYTLLQATLGELLRHLMDPGTFTSNFN
NKPWVSGQHETYLCYKVERLHNDTWVPLNQHRGFLRNQAPNIHGFPKGRH
AELCFLDLIPFWKLDGQQYRVTCFTSWSPCFSCAQEMAKFISNNEHVSLC
IFAARIYDDQGRYQEGLRALHRDGAKIAMMNYSEFEYCWDTFVDRQGRPF
QPWDGLDEHSQALSGRLRAI

(italic: nucleic acid editing domain; underline: cytoplasmic localization signal)

[0322] Chimpanzee APOBEC-3G:

(SEQ ID NO: 58)

MKPHFRNPVERMYQDTFSDNFYNRPILSHRNTVWLCYEVKTKGPSRPPLD
AKIFRGQVYSKLKYHPEMRFFHWFSKWRKLHRDQEYEVTWYISWSPCTKC
TRDVATFLAEDPKVTLTIFVARLYYFWDPDYQEALRSLCQKRDGPRATMK
IMNYDEFQHCWSKFVYSQRELFEPWNNLPKYYILLHIMLGEILRHSMDPP
TFTSNFNNELWVRGRHETYLCYEVERLHNDTWVLLNQRRGFLCNQAPHKH
GFLEGRHAELCFLDVIPFWKLDLHQDYRVTCFTSWSPCFSCAQEMAKFIS
NNKHVSLCIFAARIYDDQGRCQEGLRTLAKAGAKISIMTYSEFKHCWDTF
VDHQGCPFQPWDGLEEHSQALSGRLRAILQNQGN

(italic: nucleic acid editing domain; underline: cytoplasmic localization signal)

[0323] Green monkey APOBEC-3G:

(SEQ ID NO: 59)

MNPQIRNMVEQMEPDIFVYYFNNRPILSGRNTVWLCYEVKTKDPSGPPLD
ANIFQGKLYPEAKDHPEMKFLHWFRKWRQLHRDQEYEVTWYVSWSPCTRC
ANSVATFLAEDPKVTLTIFVARLYYFWKPDYQQALRILCQERGGPHATMK
IMNYNEFQHCWNEFVDGQGKPFKPRKNLPKHYTLLHATLGELLRHVMDPG
TFTSNFNNKPWVSGQRETYLCYKVERSHNDTWVLLNQHRGFLRNQAPDRH
GFPKGRHAELCFLDLIPFWKLDDQQYRVTCFTSWSPCFSCAQKMAKFISN
NKHVSLCIFAARIYDDQGRCQEGLRTLHRDGAKIAVMNYSEFEYCWDTFV
DRQGRPFQPWDGLDEHSQALSGRLRAI

(italic: nucleic acid editing domain; underline: cytoplasmic localization signal)

[0324] Human APOBEC-3G:

(SEQ ID NO: 60)

MKPHFRNTVERMYRDTFSYNFYNRPILSRRNTVWLCYEVKTKGPSRPPLD
AKIFRGQVYSELKYHPEMRFFHWFSKWRKLHRDQEYEVTWYISWSPCTKC
TRDMATFLAEDPKVTLTIFVARLYYFWDPDYQEALRSLCQKRDGPRATMK
IMNYDEFQHCWSKFVYSQRELFEPWNNLPKYYILLHIMLGEILRHSMDPP
TFTFNFNNEPWVRGRHETYLCYEVERMHNDTWVLLNQRRGFLCNQAPHKH
GFLEGRHAELCFLDVIPFWKLDLDQDYRVTCFTSWSPCFSCAQEMAKFIS
KNKHVSLCIFTARIYDDQGRCQEGLRTLAEAGAKISIMTYSEFKHCWDTF
VDHQGCPFQPWDGLDEHSQDLSGRLRAILQNQEN

(italic: nucleic acid editing domain; underline: cytoplasmic localization signal)

[0325] Human APOBEC-3F:

(SEQ ID NO: 61)

MKPHFRNTVERMYRDTFSYNFYNRPILSRRNTVWLCYEVKTKGPSRPRLD
AKIFRGQVYSQPEHHAEMCFLSWFCGNQLPAYKCFQITWFVSWTPCPDCV
AKLAEFLAEHPNVTLTISAARLYYYWERDYRRALCRLSQAGARVKIMDDE
EFAYCWENFVYSEGQPFMPWYKFDDNYAFLHRTLKEILRNPMEAMYPHIF
YFHFKNLRKAYGRNESWLCFTMEVVKHHSPVSWKRGVFRNQVDPETHCHA
ERCFLSWFCDDILSPNTNYEVTWYTSWSPCPECAGEVAEFLARHSNVNLT
IFTARLYYFWDTDYQEGLRSLSQEGASVEIMGYKDFKYCWENFVYNDDEP
FKPWKGLKYNFLFLDSKLQEILE

(italic: nucleic acid editing domain)

[0326] Human APOBEC-3B:

(SEQ ID NO: 62)

MNPQIRNPMERMYRDTFYDNFENEPILYGRSYTWLCYEVKIKRGRSNLLW
DTGVFRGQVYFKPQYHAEMCFLSWFCGNQLPAYKCFQITWFVSWTPCPDC
VAKLAEFLSEHPNVTLTISAARLYYYWERDYRRALCRLSQAGARVTIMDY
EEFAYCWENFVYNEGQQFMPWYKFDENYAFLHRTLKEILRYLMDPDTFTF
NFNNDPLVLRRRQTYLCYEVERLDNGTWVLMDQHMGFLCNEAKNLLCGFY
GRHAELRFLDLVPSLQLDPAQIYRVTWFISWSPCFSWGCAGEVRAFLQEN
THVRLRIFAARIYDYDPLYKEALQMLRDAGAQVSIMTYDEFEYCWDTFVY
RQGCPFQPWDGLEEHSQALSGRLRAILQNQGN

(italic: nucleic acid editing domain)

[0327] Rat APOBEC-3B:

(SEQ ID NO: 63)

MQPQGLGPNAGMGPVCLGCSHRRPYSPIRNPLKKLYQQTFYFHFKNVRYA
WGRKNNFLCYEVNGMDCALPVPLRQGVFRKQGHIHAELCFIYWFHDKVLR
VLSPMEEFKVTWYMSWSPCSKCAEQVARFLAAHRNLSLAIFSSRLYYYLR
NPNYQQKLCRLIQEGVHVAAMDLPEFKKCWNKFVDNDGQPFRPWMRLRIN
FSFYDCKLQEIFSRMNLLREDVFYLQFNNSHRVKPVQNRYYRRKSYLCYQ
LERANGQEPLKGYLLYKKGEQHVEILFLEKMRSMELSQVRITCYLTWSPC
PNCARQLAAFKKDHPDLILRIYTSRLYFYWRKKFQKGLCTLWRSGIHVDV
MDLPQFADCWTNFVNPQRPFRPWNELEKNSWRIQRRLRRIKESWGL

[0328] Bovine APOBEC-3B:

(SEQ ID NO: 64)

DGWEVAFRSGTVLKAGVLGVSMTEGWAGSGHPGQGACVWTPGTRNTMNLL
REVLFKQQFGNQPRVPAPYYRRKTYLCYQLKQRNDLTLDRGCFRNKKQRH
AEIRFIDKINSLDLNPSQSYKIICYITWSPCPNCANELVNFITRNNHLKL
EIFASRLYFHWIKSFKMGLQDLQNAGISVAVMTHTEFEDCWEQFVDNQSR
PFQPWDKLEQYSASIRRRLQRILTAPI

[0329] Chimpanzee APOBEC-3B:

(SEQ ID NO: 65)

MNPQIRNPMEWMYQRTFYYNFENEPILYGRSYTWLCYEVKIRRGHSNLLW
DTGVFRGQMYSQPEHHAEMCFLSWFCGNQLSAYKCFQITWFVSWTPCPDC
VAKLAKFLAEHPNVTLTISAARLYYYWERDYRRALCRLSQAGARVKIMDD
EEFAYCWENFVYNEGQPFMPWYKFDDNYAFLHRTLKEIIRHLMDPDTFTF
NFNNDPLVLRRHQTYLCYEVERLDNGTWVLMDQHMGFLCNEAKNLLCGFY
GRHAELRFLDLVPSLQLDPAQIYRVTWFISWSPCFSWGCAGQVRAFLQEN
THVRLRIFAARIYDYDPLYKEALQMLRDAGAQVSIMTYDEFEYCWDTFVY
RQGCPFQPWDGLEEHSQALSGRLRAILQVRASSLCMVPHRPPPPPQSPGP
CLPLCSEPPLGSLLPTGRPAPSLPFLLTASFSFPPPASLPPLPSLSLSPG
HLPVPSFHSLTSCSIQPPCSSRIRETEGWASVSKEGRDLG

[0330] Human APOBEC-3C:

(SEQ ID NO: 66)

MNPQIRNPMKAMYPGTFYFQFKNLWEANDRNETWLCFTVEGIKRRSVVSW
KTGVFRNQVDSETHCHAERCFLSWFCDDILSPNTKYQVTWYTSWSPCPDC
AGEVAEFLARHSNVNLTIFTARLYYFQYPCYQEGLRSLSQEGVAVEIMDY
EDFKYCWENFVYNDNEPFKPWKGLKTNFRLLKRRLRESLQ

(italic: nucleic acid editing domain)

[0331] Gorilla APOBEC3C:

(SEQ ID NO: 67)

MNPQIRNPMKAMYPGTFYFQFKNLWEANDRNETWLCFTVEGIKRRSVVSW
KTGVFRNQVDSETHCHAERCFLSWFCDDILSPNTNYQVTWYTSWSPCPEC
AGEVAEFLARHSNVNLTIFTARLYYFQDTDYQEGLRSLSQEGVAVKIMDY
KDFKYCWENFVYNDDEPFKPWKGLKYNFRFLKRRLQEILE

(italic: nucleic acid editing domain)

[0332] Human APOBEC-3A:

(SEQ ID NO: 68)

MEASPASGPRHLMDPHIFTSNFNNGIGRHKTYLCYEVERLDNGTSVKMDQ
HRGFLHNQAKNLLCGFYGRHAELRFLDLVPSLQLDPAQIYRVTWFISWSP
CFSWGCAGEVRAFLQENTHVRLRIFAARIYDYDPLYKEALQMLRDAGAQV
SIMTYDEFKHCWDTFVDHQGCPFQPWDGLDEHSQALSGRLRAILQNQGN

(italic: nucleic acid editing domain)

[0333] Rhesus macaque APOBEC-3A:

(SEQ ID NO: 69)

MDGSPASRPRHLMDPNTFTFNFNNDLSVRGRHQTYLCYEVERLDNGTWVP
MDERRGFLCNKAKNVPCGDYGCHVELRFLCEVPSWQLDPAQTYRVTWFIS
WSPCFRRGCAGQVRVFLQENKHVRLRIFAARIYDYDPLYQEALRTLRDAG
AQVSIMTYEEFKHCWDTFVDRQGRPFQPWDGLDEHSQALSGRLRAILQNQ
GN

(italic: nucleic acid editing domain)

[0334] Bovine APOBEC-3A:

(SEQ ID NO: 70)

MDEYTFTENFNNQGWPSKTYLCYEMERLDGDATIPLDEYKGFVRNKGLDQ
PEKPCHAELYFLGKIHSWNLDRNQHYRLTCFISWSPCYDCAQKLTTFLKE
NHHISLHILASRIYTHNRFGCHQSGLCELQAAGARITIMTFEDFKHCWET
FVDHKGKPFQPWEGLNVKSQALCTELQAILKTQQN

(italic: nucleic acid editing domain)

[0335] Human APOBEC-3H:

(SEQ ID NO: 71)

MALLTAETFRLQFNNKRRLRRPYYPRKALLCYQLTPQNGSTPTRGYFENK
KKCHAEICFINEIKSMGLDETQCYQVTCYLTWSPCSSCAWELVDFIKAHD
HLNLGIFASRLYYHWCKPQQKGLRLLCGSQVPVEVMGFPKFADCWENFVD
HEKPLSFNPYKMLEELDKNSRAIKRRLERIKIPGVRAQGRYMDILCDAEV

(italic: nucleic acid editing domain)

[0336] Rhesus macaque APOBEC-3H:

(SEQ ID NO: 72)

MALLTAKTFSLQFNNKRRVNKPYYPRKALLCYQLTPQNGSTPTRGHLKNK
KKDHAEIRFINKIKSMGLDETQCYQVTCYLTWSPCPSCAGELVDFIKAHR
HLNLRIFASRLYYHWRPNYQEGLLLLCGSQVPVEVMGLPEFTDCWENFVD
HKEPPSFNPSEKLEELDKNSQAIKRRLERIKSRSVDVLENGLRSLQLGPV
TPSSSIRNSR

[0337] Human APOBEC-3D:

(SEQ ID NO: 73)

MNPQIRNPMERMYRDTFYDNFENEPILYGRSYTWLCYEVKIKRGRSNLLW
DTGVFRGPVLPKRQSNHRQEVYFRFENHAEMCFLSWFCGNRLPANRRFQI
TWFVSWNPCLPCVVKVTKFLAEHPNVTLTISAARLYYYRDRDWRWVLLRL
HKAGARVKIMDYEDFAYCWENFVCNEGQPFMPWYKFDDNYASLHRTLKEI
LRNPMEAMYPHIFYFHFKNLLKACGRNESWLCFTMEVTKHHSAVFRKRGV
FRNQVDPETHCHAERCFLSWFCDDILSPNTNYEVTWYTSWSPCPECAGEV
AEFLARHSNVNLTIFTARLCYFWDTDYQEGLCSLSQEGASVKIMGYKDFV
SCWKNFVYSDDEPFKPWKGLQTNFRLLKRRLREILQ

(italic: nucleic acid editing domain)

[0338] Human APOBEC-1:

(SEQ ID NO: 74)

MTSEKGPSTGDPTLRRRIEPWEFDVFYDPRELRKEACLLYEIKWGMSRKI
WRSSGKNTTNHVEVNFIKKFTSERDFHPSMSCSITWFLSWSPCWECSQAI
REFLSRHPGVTLVIYVARLFWHMDQQNRQGLRDLVNSGVTIQIMRASEYY
HCWRNFVNYPPGDEAHWPQYPPLWMMLYALELHCIILSLPPCLKISRRWQ
NHLTFFRLHLQNCHYQTIPPHILLATGLIHPSVAWR

[0339] Mouse APOBEC-1:

(SEQ ID NO: 75)

MSSETGPVAVDPTLRRRIEPHEFEVFFDPRELRKETCLLYEINWGGRHSV
WRHTSQNTSNHVEVNFLEKFTTERYFRPNTRCSITWFLSWSPCGECSRAI
TEFLSRHPYVTLFIYIARLYHHTDQRNRQGLRDLISSGVTIQIMTEQEYC
YCWRNFVNYPPSNEAYWPRYPHLWVKLYVLELYCIILGLPPCLKILRRKQ
PQLTFFTITLQTCHYQRIPPHLLWATGLK

[0340] Rat APOBEC-1:

(SEQ ID NO: 76)

[sequence omitted]

[0341] Human APOBEC-2:

(SEQ ID NO: 77)

MAQKEEAAVATEAASQNGEDLENLDDPEKLKELIELPPFEIVTGERLPAN
FFKFQFRNVEYSSGRNKTFLCYVVEAQGKGGQVQASRGYLEDEHAAAHAE
EAFFNTILPAFDPALRYNVTWYVSSSPCAACADRIIKTLSKTKNLRLLIL
VGRLFMWEEPEIQAALKKLKEAGCKLRIMKPQDFEYVWQNFVEQEEGESK
AFQPWEDIQENFLYYEEKLADILK

[0342] Mouse APOBEC-2:

(SEQ ID NO: 78)

MAQKEEAAEAAAPASQNGDDLENLEDPEKLKELIDLPPFEIVTGVRLPVN
FFKFQFRNVEYSSGRNKTFLCYVVEVQSKGGQAQATQGYLEDEHAGAHAE
EAFFNTILPAFDPALKYNVTWYVSSSPCAACADRILKTLSKTKNLRLLIL
VSRLFMWEEPEVQAALKKLKEAGCKLRIMKPQDFEYIWQNFVEQEEGESK
AFEPWEDIQENFLYYEEKLADILK

[0343] Rat APOBEC-2:

(SEQ ID NO: 79)

MAQKEEAAEAAAPASQNGDDLENLEDPEKLKELIDLPPFEIVTGVRLPVN
FFKFQFRNVEYSSGRNKTFLCYVVEAQSKGGQVQATQGYLEDEHAGAHAE
EAFFNTILPAFDPALKYNVTWYVSSSPCAACADRILKTLSKTKNLRLLIL
VSRLFMWEEPEVQAALKKLKEAGCKLRIMKPQDFEYLWQNFVEQEEGESK
AFEPWEDIQENFLYYEEKLADILK

[0344] Bovine APOBEC-2:

(SEQ ID NO: 80)

MAQKEEAAAAAEPASQNGEEVENLEDPEKLKELIELPPFEIVTGERLPAH
YFKFQFRNVEYSSGRNKTFLCYVVEAQSKGGQVQASRGYLEDEHATNHAE
EAFFNSIMPTFDPALRYMVTWYVSSSPCAACADRIVKTLNKTKNLRLLIL
VGRLFMWEEPEIQAALRKLKEAGCRLRIMKPQDFEYIWQNFVEQEEGESK
AFEPWEDIQENFLYYEEKLADILK

[0345] Petromyzon marinus CDA1 (pmCDA1)

(SEQ ID NO: 81)

MTDAEYVRIHEKLDIYTFKKQFFNNKKSVSHRCYVLFELKRRGERRACFW
GYAVNKPQSGTERGIHAEIFSIRKVEEYLRDNPGQFTINWYSSWSPCADC
AEKILEWYNQELRGNGHTLKIWACKLYYEKNARNQIGLWNLRDNGVGLNV
MVSEHYQCCRKIFIQSSHNQLNENRWLEKTLKRAEKRRSELSIMIQVKIL
HTTKSPAV

[0346] Human APOBEC3G D316R_D317R

(SEQ ID NO: 82)

MKPHFRNTVERMYRDTFSYNFYNRPILSRRNTVWLCYEVKTKGPSRPPLD
AKIFRGQVYSELKYHPEMRFFHWFSKWRKLHRDQEYEVTWYISWSPCTKC
TRDMATFLAEDPKVTLTIFVARLYYFWDPDYQEALRSLCQKRDGPRATMK
IMNYDEFQHCWSKFVYSQRELFEPWNNLPKYYILLHIMLGEILRHSMDPP
TFTFNFNNEPWVRGRHETYLCYEVERMHNDTWVLLNQRRGFLCNQAPHKH
GFLEGRHAELCFLDVIPFWKLDLDQDYRVTCFTSWSPCFSCAQEMAKFIS
KNKHVSLCIFTARIYRRQGRCQEGLRTLAEAGAKISIMTYSEFKHCWDTF
VDHQGCPFQPWDGLDEHSQDLSGRLRAILQNQEN

[0347] Human APOBEC3G chain A

(SEQ ID NO: 83)

MDPPTFTFNFNNEPWVRGRHETYLCYEVERMHNDTWVLLNQRRGFLCNQA
PHKHGFLEGRHAELCFLDVIPFWKLDLDQDYRVTCFTSWSPCFSCAQEMA
KFISKNKHVSLCIFTARIYDDQGRCQEGLRTLAEAGAKISIMTYSEFKHC
WDTFVDHQGCPFQPWDGLDEHSQDLSGRLRAILQ

[0348] Human APOBEC3G chain A D120R_D121R

(SEQ ID NO: 84)

MDPPTFTFNFNNEPWVRGRHETYLCYEVERMHNDTWVLLNQRRGFLCNQA
PHKHGFLEGRHAELCFLDVIPFWKLDLDQDYRVTCFTSWSPCFSCAQEMA
KFISKNKHVSLCIFTARIYRRQGRCQEGLRTLAEAGAKISIMTYSEFKHC
WDTFVDHQGCPFQPWDGLDEHSQDLSGRLRAILQ

[0349] In some embodiments, fusion proteins as provided herein comprise the full-length amino acid of a nucleic acid editing enzyme, e.g., one of the sequences provided above. In other embodiments, however, fusion proteins as provided herein do not comprise a full-length sequence of a nucleic acid editing enzyme, but only a fragment thereof. For example, in some embodiments, a fusion protein provided herein comprises a Cas9 domain and a fragment of a nucleic acid editing enzyme, e.g., wherein the fragment comprises a nucleic acid editing domain. Exemplary amino acid sequences of nucleic acid editing domains are shown in the sequences above as italicized letters, and additional suitable sequences of such domains will be apparent to those of skill in the art.

[0350] Additional suitable nucleic-acid editing enzyme sequences, e.g., deaminase enzyme and domain sequences, that can be used according to aspects of this invention, e.g., that can be fused to a nuclease-inactive Cas9 domain, will be apparent to those of skill in the art based on this disclosure. In some embodiments, such additional enzyme sequences include deaminase enzyme or deaminase domain sequences that are at least 70%, at least 75%, at least 80%, at least 85%, at least 90%, at least 95%, at least 96%, at least 97%, at least 98%, or at least 99% similar to the sequences provided herein. Additional suitable Cas9 domains, variants, and sequences will also be apparent to those of skill in the art. Examples of such additional suitable Cas9 domains include, but are not limited to, D10A, D10A/D839A/H840A, and D10A/D839A/H840A/N863A mutant domains (see, e.g., Prashant et al., CAS9 transcriptional activators for target specificity screening and paired nickases for cooperative genome engineering. Nature Biotechnology. 2013; 31(9): 833-838 the entire contents of which are incorporated herein by reference). In some embodiments, the Cas9 comprises a histidine residue at position 840 of the amino acid sequence provided in SEQ ID NO: 6, or a corresponding mutation in any Cas9 protein, such as any one of the Cas9 amino acid sequences as provided herein. The presence of the catalytic residue H840 restores the acvitity of the Cas9 to cleave the non-edited strand containing a G opposite the targeted C. Restoration of H840 does not result in the cleavage of the target strand containing the C.

[0351] Additional suitable strategies for generating fusion proteins comprising a Cas9 domain and a deaminase domain will be apparent to those of skill in the art based on this disclosure in combination with the general knowledge in the art. Suitable strategies for generating fusion proteins according to aspects of this disclosure using linkers or without the use of linkers will also be apparent to those of skill in the art in view of the instant disclosure and the knowledge in the art. For example, Gilbert et al., CRISPR-mediated modular RNA-guided regulation of transcription in eukaryotes. Cell. 2013; 154(2):442-51, showed that C-terminal fusions of Cas9 with VP64 using 2 NLS's as a linker (SPKKKRKVEAS, SEQ ID NO: 617), can be employed for transcriptional activation. Mali et al., CAS9 transcriptional activators for target specificity screening and paired nickases for cooperative genome engineering. Nat Biotechnol. 2013; 31(9):833-8, reported that C-terminal fusions with VP64 without linker can be employed for transcriptional activation. And Maeder et al., CRISPR RNA-guided activation of endogenous human genes. Nat Methods. 2013; 10: 977-979, reported that C-terminal fusions with VP64 using a Gly₄Ser (SEQ ID NO: 613) linker can be used as transcriptional activators. Recently, dCas9-FokI nuclease fusions have successfully been generated and exhibit improved enzymatic specificity as compared to the parental Cas9 enzyme (In Guilinger J P, Thompson D B, Liu D R. Fusion of catalytically inactive Cas9 to FokI nuclease improves the specificity of genome modification. Nat. Biotechnol. 2014; 32(6): 577-82, and in Tsai S Q, Wyvekens N, Khayter C, Foden J A, Thapar V, Reyon D, Goodwin M J, Aryee M J, Joung J K. Dimeric CRISPR RNA-guided FokI nucleases for highly specific genome editing. Nat Biotechnol. 2014; 32(6):569-76. PMID: 24770325 a SGSETPGTSESATPES (SEQ ID NO: 604) or a GGGGS (SEQ ID NO: 607) linker was used in FokI-dCas9 fusion proteins, respectively).

[0352] Some aspects of this disclosure provide fusion proteins comprising (i) a Cas9 enzyme or domain (e.g., a first protein); and (ii) a nucleic acid-editing enzyme or domain (e.g., a second protein). In some aspects, the fusion proteins provided herein further include (iii) a programmable DNA-binding protein, for example, a zinc-finger domain, a TALE, or a second Cas9 protein (e.g., a third protein). Without wishing to be bound by any particular theory, fusing a programmable DNA-binding protein (e.g., a second Cas9 protein) to a fusion protein comprising (i) a Cas9 enzyme or domain (e.g., a first protein); and (ii) a nucleic acid-editing enzyme or domain (e.g., a second protein) may be useful for improving specificity of the fusion protein to a target nucleic acid sequence, or for improving specificity or binding affinity of the fusion protein to bind target nucleic acid sequence that does not contain a canonical PAM (NGG) sequence. In some embodiments, the third protein is a Cas9 protein (e.g, a second Cas9 protein). In some embodiments, the third protein is any of the Cas9 proteins provided herein. In some embodiments, the third protein is fused to the fusion protein N-terminal to the Cas9 protein (e.g., the first protein). In some embodiments, the third protein is fused to the fusion protein C-terminal to the Cas9 protein (e.g., the first protein). In some embodiments, the Cas9 domain (e.g., the first protein) and the third protein (e.g., a second Cas9 protein) are fused via a linker (e.g., a second linker). In some embodiments, the linker comprises a (GGGGS)ₙ (SEQ ID NO: 607), a (G)ₙ (SEQ ID NO: 608), an (EAAAK)ₙ (SEQ ID NO: 609), a (GGS)ₙ (SEQ ID NO: 610), (SGGS)ₙ (SEQ ID NO: 606), a SGSETPGTSESATPES (SEQ ID NO: 604), a SGGS(GGS)ₙ (SEQ ID NO: 612), a SGGSSGGSSGSETPGTSESATPESSGGSSGGS (SEQ ID NO: 605), or an (XP)ₙ (SEQ ID NO: 611) motif, or a combination of any of these, wherein n is independently an integer between 1 and 30. In some embodiments, the general architecture of exemplary napDNAbp fusion proteins provided herein comprises the structure:

[NH2]-[nucleic acid-editing enzyme or domain]-[napDNAbp]-[third protein]-[COOH];
[NH2]-[third protein]-[napDNAbp]-[nucleic acid-editing enzyme or domain]-[COOH];
[NH2]-[napDNAbp]-[nucleic acid-editing enzyme or domain]-[third protein]-[COOH];
[NH2]-[third protein]-[nucleic acid-editing enzyme or domain]-[napDNAbp]-[COOH];
[NH2]-[UGI]-[nucleic acid-editing enzyme or domain]-[napDNAbp]-[third protein]-[COOH];
[NH2]-[UGI]-[third protein]-[napDNAbp]-[nucleic acid-editing enzyme or domain]-[COOH];
[NH2]-[UGI]-[napDNAbp]-[nucleic acid-editing enzyme or domain]-[third protein]-[COOH];
[NH2]-[UGI]-[third protein]-[nucleic acid-editing enzyme or domain]-[napDNAbp]-[COOH];
[NH2]-[nucleic acid-editing enzyme or domain]-[napDNAbp]-[third protein]-[UGI]-[COOH];
[NH2]-[third protein]-[napDNAbp]-[nucleic acid-editing enzyme or domain]-[UGI]-[COOH];
[NH2]-[NapDNAbp]-[nucleic acid-editing enzyme or domain]-[third protein]-[UGI]-[COOH];
[NH2]-[third protein]-[nucleic acid-editing enzyme or domain]-[NapDNAbp]-[UGI]-[COOH]; or
[NH2]-[nucleic acid-editing enzyme or domain]-[NapDNAbp]-[first UGI domain]-[second UGI domain]-[COOH];
wherein NH2 is the N-terminus of the fusion protein, and COOH is the C-terminus of the fusion protein. In some embodiments, the “]-[“used in the general architecture above indicates the presence of an optional linker sequence. In other examples, the general architecture of exemplary NapDNAbp fusion proteins provided herein comprises the structure:
[NH2]-[nucleic acid-editing enzyme or domain]-[NapDNAbp]-[second NapDNAbp protein]-[COOH];
[NH2]-[second NapDNAbp protein]-[NapDNAbp]-[nucleic acid-editing enzyme or domain]-[COOH];
[NH2]-[NapDNAbp]-[nucleic acid-editing enzyme or domain]-[second NapDNAbp protein]-[COOH];
[NH2]-[second NapDNAbp protein]-[nucleic acid-editing enzyme or domain]-[NapDNAbp]-[COOH];
[NH2]-[UGI]-[nucleic acid-editing enzyme or domain]-[NapDNAbp]-[second NapDNAbp protein]-[COOH],
[NH2]-[UGI]-[second NapDNAbp protein]-[NapDNAbp]-[nucleic acid-editing enzyme or domain]-[COOH];
[NH2]-[UGI]-[NapDNAbp]-[nucleic acid-editing enzyme or domain]-[second NapDNAbp protein]-[COOH];
[NH2]-[UGI]-[second NapDNAbp protein]-[nucleic acid-editing enzyme or domain]-[NapDNAbp]-[COOH];
[NH2]-[nucleic acid-editing enzyme or domain]-[NapDNAbp]-[second NapDNAbp protein]-[UGI]-[COOH];
[NH2]-[second NapDNAbp protein]-[NapDNAbp]-[nucleic acid-editing enzyme or domain]-[UGI]-[COOH];
[NH2]-[NapDNAbp]-[nucleic acid-editing enzyme or domain]-[second NapDNAbp protein]-[UGI]-[COOH]; or
[NH2]-[second NapDNAbp protein]-[nucleic acid-editing enzyme or domain]-[NapDNAbp]-[UGI]-[COOH];
wherein NH₂ is the N-terminus of the fusion protein, and COOH is the C-terminus of the fusion protein. In some embodiments, the “]-[” used in the general architecture above indicates the presence of an optional linker sequence. In some embodiments, the second NapDNAbp is a dCas9 protein. In some examples, the general architecture of exemplary Cas9 fusion proteins provided herein comprises a structure as shown in FIG. 3. It should be appreciated that any of the proteins provided in any of the general architectures of exemplary Cas9 fusion proteins may be connected by one or more of the linkers provided herein. In some embodiments, the linkers are the same. In some embodiments, the linkers are different. In some embodiments, one or more of the proteins provided in any of the general architectures of exemplary Cas9 fusion proteins are not fused via a linker. In some embodiments, the fusion proteins further comprise a nuclear targeting sequence, for example a nuclear localization sequence. In some embodiments, fusion proteins provided herein further comprise a nuclear localization sequence (NLS). In some embodiments, the NLS is fused to the N-terminus of the fusion protein. In some embodiments, the NLS is fused to the C-terminus of the fusion protein. In some embodiments, the NLS is fused to the N-terminus of the third protein. In some embodiments, the NLS is fused to the C-terminus of the third protein. In some embodiments, the NLS is fused to the N-terminus of the Cas9 protein. In some embodiments, the NLS is fused to the C-terminus of the Cas9 protein. In some embodiments, the NLS is fused to the N-terminus of the nucleic acid-editing enzyme or domain. In some embodiments, the NLS is fused to the C-terminus of the nucleic acid-editing enzyme or domain. In some embodiments, the NLS is fused to the N-terminus of the UGI protein. In some embodiments, the NLS is fused to the C-terminus of the UGI protein. In some embodiments, the NLS is fused to the fusion protein via one or more linkers. In some embodiments, the NLS is fused to the fusioin protein without a linker

### Uracil Glycosylase Inhibitor Fusion Proteins

[0353] Some aspects of the disclosure relate to fusion proteins that comprise a uracil glycosylase inhibitor (UGI) domain. In some embodiments, any of the fusion proteins provided herein that comprise a Cas9 domain (e.g., a nuclease active Cas9 domain, a nuclease inactive dCas9 domain, or a Cas9 nickase) may be further fused to a UGI domain either directly or via a linker. Some aspects of this disclosure provide deaminase-dCas9 fusion proteins, deaminase-nuclease active Cas9 fusion proteins and deaminase-Cas9 nickase fusion proteins with increased nucleobase editing efficiency. Without wishing to be bound by any particular theory, cellular DNA-repair response to the presence of U:G heteroduplex DNA may be responsible for the decrease in nucleobase editing efficiency in cells. For example, uracil DNA glycosylase (UDG) catalyzes removal of U from DNA in cells, which may initiate base excision repair, with reversion of the U:G pair to a C:G pair as the most common outcome. As demonstrated in the Examples below, Uracil DNA Glycosylase Inhibitor (UGI) may inhibit human UDG activity. Thus, this disclosure contemplates a fusion protein comprising dCas9-nucleic acid editing domain further fused to a UGI domain. This disclosure also contemplates a fusion protein comprising a Cas9 nickase-nucleic acid editing domain further fused to a UGI domain. It should be understood that the use of a UGI domain may increase the editing efficiency of a nucleic acid editing domain that is capable of catalyzing a C to U change. For example, fusion proteins comprising a UGI domain may be more efficient in deaminating C residues. In some embodiments, the fusion protein comprises the structure:
[0354] [deaminase]-[optional linker sequence]-[dCas9]-[optional linker sequence]-[UGI];
[0355] [deaminase]-[optional linker sequence]-[UGI]-[optional linker sequence]-[dCas9];
[0356] [UGI]-[optional linker sequence]-[deaminase]-[optional linker sequence]-[dCas9];
[0357] [UGI]-[optional linker sequence]-[dCas9]-[optional linker sequence]-[deaminase];
[0358] [dCas9]-[optional linker sequence]-[deaminase]-[optional linker sequence]-[UGI];
[0359] [dCas9]-[optional linker sequence]-[UGI]-[optional linker sequence]-[deaminase];
[0360] [deaminase]-[optional linker sequence]-[dCas9]-[optional linker sequence]-[first UGI]-[optional linker sequence]-[second UGI];
[0361] [deaminase]-[optional linker sequence]-[first UGI]-[optional linker seqeunce]-[second UGI]-[optional linker sequence]-[dCas9];
[0362] [first UGI]-[optional linker sequence]-[second UGI]-[optional linker sequence]-[deaminase]-[optional linker sequence]-[dCas9];
[0363] [first UGI]-[optional linker sequence]-[second UGi]-[optional linker sequence]-[dCas9]-[optional linker sequence]-[deaminase];
[0364] [dCas9]-[optional linker sequence]-[deaminase]-[optional linker sequence]-[first UGI]-[optional linker sequence]-[second UGI]; or
[0365] [dCas9]-[optional linker sequence]-[first UGI]-[optional linker sequence]-[second UGI]-[optional linker sequence]-[deaminase].

[0366] In other embodiments, the fusion protein comprises the structure:
[0367] [deaminase]-[optional linker sequence]-[Cas9 nickase]-[optional linker sequence]-[UGI];
[0368] [deaminase]-[optional linker sequence]-[UGI]-[optional linker sequence]-[Cas9 nickase];
[0369] [UGI]-[optional linker sequence]-[deaminase]-[optional linker sequence]-[Cas9 nickase];
[0370] [UGI]-[optional linker sequence]-[Cas9 nickase]-[optional linker sequence]-[deaminase];
[0371] [Cas9 nickase]-[optional linker sequence]-[deaminase]-[optional linker sequence]-[UGI]; [Cas9 nickase]-[optional linker sequence]-[UGI]-[optional linker sequence]-[deaminase]
[0372] [deaminase]-[optional linker sequence]-[Cas9 nickase]-[optional linker sequence]-[first UGI]-[optional linker sequence]-[second UGI];
[0373] [deaminase]-[optional linker sequence]-[first UGI]-[optional linker seqeunce]-[second UGI]-[optional linker sequence]-[Cas9 nickase];
[0374] [first UGI]-[optional linker sequence]-[second UGI]-[optional linker sequence]-[deaminase]-[optional linker sequence]-[Cas9 nickase];
[0375] [first UGI]-[optional linker sequence]-[second UGi]-[optional linker sequence]-[Cas9 nickase]-[optional linker sequence]-[deaminase];
[0376] [Cas9 nickase]-[optional linker sequence]-[deaminase]-[optional linker sequence]-[first UGI]-[optional linker sequence]-[second UGI]; or
[0377] [Cas9 nickase]-[optional linker sequence]-[first UGI]-[optional linker sequence]-[second UGI]-[optional linker sequence]-[deaminase].

[0378] It should be appreciated that any of the fusion proteins described above may be comprised of (i) a nucleic acid programmable DNA binding protein (napDNAbp); (ii) a cytidine deaminase domain; and (iii) two or more UGI domains, wherein the two or more UGI domains may be adjacent (e.g., [first UGI]-[second UGI], wherein “-” is an optional linker) to one another in the construct, or the two or more UGI domains may be separated by the napDNAbp of (i) and/or the cytidine deaminase domain of (ii) (e.g., [first UGI]-[deaminase]-[second UGI], [first UGI]-[napDNAbp]-[second UGI], [first UGI]-[deaminase]-[napDNAbp]-[second UGI], ect., wherein “-” is an optional linker).

[0379] In another aspect, the fusion protein comprises: (i) a Cas9 enzyme or domain; (ii) a nucleic acid-editing enzyme or domain (e.g., a second protein) (e.g., a cytidine deaminase domain); (iii) a first uracil glycosylase inhibitor domain (UGI) (e.g., a third protein); and (iv) a second uracil glycosylase inhibitor domain (UGI) (e.g., a fourth protein). The first and second uracil glycosylase inhibitor domains (UGIs) may be the same or different. In some embodiments, the Cas9 domain (e.g., the first protein) and the deaminase (e.g., the second protein) are fused via a linker. In some embodiments, the Cas9 domain is fused to the C-terminus of the deaminase. In some embodiments, the Cas9 protein (e.g., the first protein) and the first UGI domain (e.g., the third protein) are fused via a linker (e.g., a second linker). In some embodiments, the first UGI domain is fused to the C-terminus of the Cas9 protein. In some embodiments, the first UGI domain (e.g., the third protein) and the second UGI domain (e.g., the forth protein) are fused via a linker (e.g., a third linker). In some embodiments, the second UGI domain is fused to the C-terminus of the first UGI domain. In some embodiments, the linker comprises a (GGGGS)ₙ (SEQ ID NO: 607), a (G)ₙ (SEQ ID NO: 608), an (EAAAK)ₙ (SEQ ID NO: 609), a (GGS)ₙ (SEQ ID NO: 610), (SGGS)ₙ (SEQ ID NO: 606), a SGSETPGTSESATPES (SEQ ID NO: 604), a SGGS(GGS)ₙ (SEQ ID NO: 612), a SGGSSGGSSGSETPGTSESATPESSGGSSGGS (SEQ ID NO: 605), or an (XP)ₙ (SEQ ID NO: 611) motif, or a combination of any of these, wherein n is independently an integer between 1 and 30. In some embodiments, the first linker comprises an amino acid sequence of 1-50 amino acids. In some embodiments, the first linker comprises an amino acid sequence of 1-40 amino acids. In some embodiments, the first linker comprises an amino acid sequence of 1-35 amino acids. In some embodiments, the first linker comprises an amino acid sequence of 1-30 amino acids. In some embodiments, the first linker comprises an amino acid sequence of 1-20 amino acids. In some embodiments, the first linker comprises an amino acid sequence of 10-20 amino acids. In some embodiments, the first linker comprises an amino acid sequence of 30-40 amino acids. In some embodiments, the first linker comprises an amino acid sequence of 14, 16, or 18 amino acids. In some embodiments, the first linker comprises an amino acid sequence of 16 amino acids. In some embodiments, the first linker comprises an amino acid sequence of 30, 32, or 34 amino acids. In some embodiments, the first linker comprises an amino acid sequence of 32 amino acids. In some embodiments, the first linker comprises a SGSETPGTSESATPES (SEQ ID NO: 604) motif. In some embodiments, the first linker comprises a SGGSSGGSSGSETPGTSESATPESSGGSSGGS (SEQ ID NO: 605) motif. In some embodiments, the second linker comprises comprises an amino acid sequence of 1-50 amino acids. In some embodiments, the second linker comprises an amino acid sequence of 1-40 amino acids. In some embodiments, the second linker comprises an amino acid sequence of 1-35 amino acids. In some embodiments, the second linker comprises an amino acid sequence of 1-30 amino acids. In some embodiments, the second linker comprises an amino acid sequence of 1-20 amino acids. In some embodiments, the second linker comprises an amino acid sequence of 2-20 amino acids. In some embodiments, the second linker comprises an amino acid sequence of 2-10 amino acids. In some embodiments, the second linker comprises an amino acid sequence of 10-20 amino acids. In some embodiments, the second linker comprises an amino acid sequence of 2, 4, or 6 amino acids. In some embodiments, the second linker comprises an amino acid sequence of 7, 9, or 11 amino acids. In some embodiments, the second linker comprises an amino acid sequence of 14, 16, or 18 amino acids. In some embodiments, the second linker comprises an amino acid sequence of 4 amino acids. In some embodiments, the second linker comprises an amino acid sequence of 9 amino acids. In some embodiments, the second linker comprises an amino acid sequence of 16 amino acids. In some embodiments, the second linker comprises a (SGGS)ₙ (SEQ ID NO: 606) motif, wherein n is an integer between 1 and 30, inclusive. In some embodiments, the second linker comprises a (SGGS)ₙ (SEQ ID NO: 606) motif, wherein n is 1. In some embodiments, the second linker comprises a SGGS(GGS)ₙ (SEQ ID NO: 612) motif, wherein n is an integer between 1 and 30, inclusive. In some embodiments, the second linker comprises a SGGS(GGS)ₙ (SEQ ID NO: 612) motif, wherein n is 2. In some embodiments, the third linker comprises comprises an amino acid sequence of 1-50 amino acids. In some embodiments, the third linker comprises an amino acid sequence of 1-40 amino acids. In some embodiments, the third linker comprises an amino acid sequence of 1-35 amino acids. In some embodiments, the third linker comprises an amino acid sequence of 1-30 amino acids. In some embodiments, the third linker comprises an amino acid sequence of 1-20 amino acids. In some embodiments, the third linker comprises an amino acid sequence of 2-20 amino acids. In some embodiments, the third linker comprises an amino acid sequence of 2-10 amino acids. In some embodiments, the third linker comprises an amino acid sequence of 10-20 amino acids. In some embodiments, the third linker comprises an amino acid sequence of 2, 4, or 6 amino acids. In some embodiments, the third linker comprises an amino acid sequence of 7, 9, or 11 amino acids. In some embodiments, the third linker comprises an amino acid sequence of 14, 16, or 18 amino acids. In some embodiments, the third linker comprises an amino acid sequence of 4 amino acids. In some embodiments, the third linker comprises an amino acid sequence of 9 amino acids. In some embodiments, the third linker comprises an amino acid sequence of 16 amino acids. In some embodiments, the third linker comprises a (SGGS)ₙ (SEQ ID NO: 606) motif, wherein n is an integer between 1 and 30, inclusive. In some embodiments, the third linker comprises a (SGGS)ₙ (SEQ ID NO: 606) motif, wherein n is 1. In some embodiments, the third linker comprises a SGGS(GGS)ₙ (SEQ ID NO: 612)motif, wherein n is an integer between 1 and 30, inclusive. In some embodiments, the third linker comprises a SGGS(GGS)ₙ (SEQ ID NO: 612) motif, wherein n is 2.

[0380] In some embodiments, the fusion protein comprises the structure:
[0381] [deaminase]-[optional linker sequence]-[dCas9]-[optional linker sequence]-[first UGI]-[optional linker sequence]-[second UGI];
[0382] [deaminase]-[optional linker sequence]-[Cas9 nickase]-[optional linker sequence]-[first UGI]-[optional linker sequence]-[second UGI]; or
[0383] [deaminase]-[optional linker sequence]-[Cas9]-[optional linker sequence]-[first UGI]-[optional linker sequence]-[second UGI].

[0384] In another aspect, the fusion protein comprises: (i) a Cas9 enzyme or domain; (ii) a nucleic acid-editing enzyme or domain (e.g., a second protein) (e.g., a cytidine deaminase domain); (iii) more than two uracil glycosylase inhibitor (UGI) domains.

[0385] In some embodiments, the fusion proteins provided herein do not comprise a linker sequence. In some embodiments, one or both of the optional linker sequences are present. In some embodiments, one, two, or three of the optional linker sequences are present.

[0386] In some embodiments, the “-” used in the general architecture above indicates the presence of an optional linker sequence. In some embodiments, the fusion proteins comprising a UGI further comprise a nuclear targeting sequence, for example a nuclear localization sequence. In some embodiments, fusion proteins provided herein further comprise a nuclear localization sequence (NLS). In some embodiments, the NLS is fused to the N-terminus of the fusion protein. In some embodiments, the NLS is fused to the C-terminus of the fusion protein. In some embodiments, the NLS is fused to the N-terminus of the UGI protein. In some embodiments, the NLS is fused to the C-terminus of the UGI protein. In some embodiments, the NLS is fused to the N-terminus of the Cas9 protein. In some embodiments, the NLS is fused to the C-terminus of the Cas9 protein. In some embodiments, the NLS is fused to the N-terminus of the deaminase. In some embodiments, the NLS is fused to the C-terminus of the deaminase. In some embodiments, the NLS is fused to the N-terminus of the second Cas9. In some embodiments, the NLS is fused to the C-terminus of the second Cas9. In some embodiments, the NLS is fused to the fusion protein via one or more linkers. In some embodiments, the NLS is fused to the fusioin protein without a linker. In some embodiments, the NLS comprises an amino acid sequence of any one of the NLS sequences provided or referenced herein. In some embodiments, the NLS comprises an amino acid sequence as set forth in SEQ ID NO: 614 or SEQ ID NO: 615.

[0387] In some embodiments, a UGI domain comprises a wild-type UGI or a UGI as set forth in SEQ ID NO: 134. In some embodiments, the UGI proteins provided herein include fragments of UGI and proteins homologous to a UGI or a UGI fragment. For example, in some embodiments, a UGI domain comprises a fragment of the amino acid sequence set forth in SEQ ID NO: 134. In some embodiments, a UGI fragment comprises an amino acid sequence that comprises at least 60%, at least 65%, at least 70%, at least 75%, at least 80%, at least 85%, at least 90%, at least 95%, at least 96%, at least 97%, at least 98%, at least 99%, or at least 99.5% of the amino acid sequence as set forth in SEQ ID NO: 134. In some embodiments, a UGI comprises an amino acid sequence homologous to the amino acid sequence set forth in SEQ ID NO: 134 or an amino acid sequence homologous to a fragment of the amino acid sequence set forth in SEQ ID NO: 134. In some embodiments, proteins comprising UGI or fragments of UGI or homologs of UGI or UGI fragments are referred to as “UGI variants.” A UGI variant shares homology to UGI, or a fragment thereof. For example a UGI variant is at least 70% identical, at least 75% identical, at least 80% identical, at least 85% identical, at least 90% identical, at least 95% identical, at least 96% identical, at least 97% identical, at least 98% identical, at least 99% identical, at least 99.5% identical, or at least 99.9% identical to a wild type UGI or a UGI as set forth in SEQ ID NO: 134. In some embodiments, the UGI variant comprises a fragment of UGI, such that the fragment is at least 70% identical, at least 80% identical, at least 90% identical, at least 95% identical, at least 96% identical, at least 97% identical, at least 98% identical, at least 99% identical, at least 99.5% identical, or at least 99.9% to the corresponding fragment of wild-type UGI or a UGI as set forth in SEQ ID NO: 134. In some embodiments, the UGI comprises the following amino acid sequence:

>sp1P147391UNGI_BPPB2 Uracil-DNA glycosylase inhibitor

(SEQ ID NO: 134)

MTNLSDIIEKETGKQLVIQESILMLPEEVEEVIGNKPESDILVHTAYDES
TDENVMLLTSDAPEYKPWALVIQDSNGENKIKML

[0388] Suitable UGI protein and nucleotide sequences are provided herein and additional suitable UGI sequences are known to those in the art, and include, for example, those published in Wang et al., Uracil-DNA glycosylase inhibitor gene of bacteriophage PBS2 encodes a binding protein specific for uracil-DNA glycosylase. J. Biol. Chem. 264:1163-1171(1989); Lundquist et al., Site-directed mutagenesis and characterization of uracil-DNA glycosylase inhibitor protein. Role of specific carboxylic amino acids in complex formation with Escherichia coli uracil-DNA glycosylase. J. Biol. Chem. 272:21408-21419(1997); Ravishankar et al., X-ray analysis of a complex of Escherichia coli uracil DNA glycosylase (EcUDG) with a proteinaceous inhibitor. The structure elucidation of a prokaryotic UDG. Nucleic Acids Res. 26:4880-4887(1998); and Putnam et al., Protein mimicry of DNA from crystal structures of the uracil-DNA glycosylase inhibitor protein and its complex with Escherichia coli uracil-DNA glycosylase. J. Mol. Biol. 287:331-346(1999), the entire contents of each are incorporated herein by reference.

[0389] It should be appreciated that additional proteins may be uracil glycosylase inhibitors. For example, other proteins that are capable of inhibiting (e.g., sterically blocking) a uracil-DNA glycosylase base-excision repair enzyme are within the scope of this disclosure. Additionally, any proteins that block or inhibit base-excision repair as also within the scope of this disclosure. In some embodiments, the fusion proteins described herein comprise one UGI domain. In some embodiments, the fusion proteins described herein comprise more than one UGI domain. In some embodiments, the fusion proteins described herein comprise two UGI domains. In some embodiments, the fusion proteins described herein comprise more than two UGI domains. In some embodiments, a protein that binds DNA is used. In another embodiment, a substitute for UGI is used. In some embodiments, a uracil glycosylase inhibitor is a protein that binds single-stranded DNA. For example, a uracil glycosylase inhibitor may be a Erwinia tasmaniensis single-stranded binding protein. In some embodiments, the single-stranded binding protein comprises the amino acid sequence (SEQ ID NO: 135). In some embodiments, a uracil glycosylase inhibitor is a protein that binds uracil. In some embodiments, a uracil glycosylase inhibitor is a protein that binds uracil in DNA. In some embodiments, a uracil glycosylase inhibitor is a catalytically inactive uracil DNA-glycosylase protein. In some embodiments, a uracil glycosylase inhibitor is a catalytically inactive uracil DNA-glycosylase protein that does not excise uracil from the DNA. For example, a uracil glycosylase inhibitor is a UdgX. In some embodiments, the UdgX comprises the amino acid sequence (SEQ ID NO: 136). As another example, a uracil glycosylase inhibitor is a catalytically inactive UDG. In some embodiments, a catalytically inactive UDG comprises the amino acid sequence (SEQ ID NO: 137). It should be appreciated that other uracil glycosylase inhibitors would be apparent to the skilled artisan and are within the scope of this disclosure. In some embodiments, a uracil glycosylase inhibitor is a protein that is homologous to any one of SEQ ID NOs: 135-137 or 143-148. In some embodiments, a uracil glycosylase inhibitor is a protein that is at least 50% identical, at least 55% identical at least 60% identical, at least 65% identical, at least 70% identical, at least 75% identical, at least 80% identical at least 85% identical, at least 90% identical, at least 95% identical, at least 96% identical, at least 98% identical, at least 99% identical, or at least 99.5% identical to any one of SEQ ID NOs: 135-137 or 143-148.

Erwinia tasmaniensis SSB (themostable single-stranded DNA binding protein)

(SEQ ID NO: 135)

MASRGVNKVILVGNLGQDPEVRYMPNGGAVANITLATSESWRDKQTGETK
EKTEWHRVVLFGKLAEVAGEYLRKGSQVYIEGALQTRKWTDQAGVEKYTT
EVVVNVGGTMQMLGGRSQGGGASAGGQNGGSNNGWGQPQQPQGGNQFSGG
AQQQARPQQQPQQNNAPANNEPPIDFDDDIP

UdgX (binds to Uracil in DNA but does not excise)

(SEQ ID NO: 136)

MAGAQDFVPHTADLAELAAAAGECRGCGLYRDATQAVFGAGGRSARIMMI
GEQPGDKEDLAGLPFVGPAGRLLDRALEAADIDRDALYVTNAVKHFKFTR
AAGGKRRIHKTPSRTEVVACRPWLIAEMTSVEPDVVVLLGATAAKALLGN
DFRVTQHRGEVLHVDDVPGDPALVATVHPSSLLRGPKEERESAFAGLVDD
LRVAADVRP

UDG (catalytically inactive human UDG, binds to Uracil in DNA but does not excise)

(SEQ ID NO: 137)

MIGQKTLYSFFSPSPARKRHAPSPEPAVQGTGVAGVPEESGDAAAIPAKK
APAGQEEPGTPPSSPLSAEQLDRIQRNKAAALLRLAARNVPVGFGESWKK
HLSGEFGKPYFIKLMGFVAEERKHYTVYPPPHQVFTWTQMCDIKDVKVVI
LGQEPYHGPNQAHGLCFSVQRPVPPPPSLENIYKELSTDIEDFVHPGHGD
LSGWAKQGVLLLNAVLTVRAHQANSHKERGWEQFTDAVVSWLNQNSNGLV
FLLWGSYAQKKGSAIDRKRHHVLQTAHPSPLSVYRGFFGCRHFSKTNELL
QKSGKKPIDWKEL

[0390] Additional single-stranded DNA binding proteins that can be used as a UGI are shown below. It should be appreciated that other single-stranded binding proteins may be used as a UGI, for example those described in Dickey T H, Altschuler S E, Wuttke D S. Single-stranded DNA-binding proteins:multiple domains for multiple functions. Structure. 2013 Jul. 2; 21(7):1074-84.

doi: 10.1016/j.str.2013.05.013. Review.; Marceau A H. Functions of single-strand DNA-binding proteins in DNA replication, recombination, and repair. Methods Mol Biol. 2012; 922:1-21. doi:
10.1007/978-1-62703-032-8_1.; Mijakovic, Ivan, et al.; Bacterial single-stranded DNA-binding proteins are phosphorylated on tyrosine. Nucleic Acids Res 2006; 34 (5): 1588-1596. doi: 10.1093/nar/gkj514; Mumtsidu E, Makhov A M, Konarev P V, Svergun D I, Griffith J D, Tucker P A. Structural features of the single-stranded DNA-binding protein of Epstein-Barrvirus. J Struct Biol. 2008 February; 161(2):172-87. Epub 2007 Nov. 1; Nowak M, Olszewski M, Śpibida M, Kur J. Characterization of single-strandedDNA-binding proteins from the psychrophilic bacteria Desulfotalea psychrophila, Flavobacterium psychrophilum, Psychrobacter arcticus, Psychrobactercryohalolentis, Psychromonas ingrahamii, Psychroflexus torquis, and Photobacterium profundum. BMC Microbiol. 2014 Apr. 14; 14:91. doi: 10.1186/1471-2180-14-91; Tone T, Takeuchi A, Makino O. Single-stranded DNA binding protein Gp5 of Bacillus subtilis phage Φ29 is required for viral DNA replication in growth-temperature dependent fashion. Biosci Biotechnol Biochem. 2012; 76(12):2351-3. Epub 2012 Dec. 7; Wold. REPLICATION PROTEIN A:A Heterotrimeric, Single-Stranded DNA-Binding Protein Required for Eukaryotic DNA Metabolism. Annual Review of Biochem. 1997; 66:61-92. doi: 10.1146/annurev.biochem.66.1.61; Wu Y, Lu J, Kang T. Human single-stranded DNA binding proteins: guardians of genome stability. Acta Biochim Biophys Sin (Shanghai). 2016 July; 48(7):671-7. doi: 10.1093/abbs/gmw044. Epub 2016 May 23. Review; the entire contents of each are hereby incorporated by reference.
mtSSB—SSBP1 single stranded DNA binding protein 1 [Homo sapiens (human)] (UniProtKB: Q04837; NP_001243439.1)

(SEQ ID NO: 138)

MFRRPVLQVLRQFVRHESETTTSLVLERSLNRVHLLGRVGQDPVLRQVEG
KNPVTIFSLATNEMWRSGDSEVYQLGDVSQKTTWHRISVFRPGLRDVAYQ
YVKKGSRIYLEGKIDYGEYMDKNNVRRQATTIIADNIIFLSDQTKEKE

Single-stranded DNA-binding protein 3 isoform A [Mus musculus] (UniProtKB-Q9D032-1; NCBI Ref: NP_076161.2)

(SEQ ID NO: 139)

MFAKGKGSAVPSDGQAREKLALYVYEYLLHVGAQKSAQTFLSEIRWEKNI
TLGEPPGFLHSWWCVFWDLYCAAPERRDTCEHSSEAKAFHDYSAAAAPSP
VLGNIPPNDGMPGGPIPPGFFQGPPGSQPSPHAQPPPHNPSSMMGPHSQP
FMSPRYAGGPRPPIRMGNQPPGGVPGTQPLLPNSMDPTRQQGHPNMGGSM
QRMNPPRGMGPMGPGPQNYGSGMRPPPNSLGPAMPGINMGPGAGRPWPNP
NSANSIPYSSSSPGTYVGPPGGGGPPGTPIMPSPADSTNSSDNIYTMINP
VPPGGSRSNFPMGPGSDGPMGGMGGMEPHHMNGSLGSGDIDGLPKNSPNN
ISGISNPPGTPRDDGELGGNFLHSFQNDNYSPSMTMSV

RPA 1—Replication protein A 70 kDa DNA-binding subunit (UniProtKB: P27694; NCBI Ref: NM_002945.3)

(SEQ ID NO: 140)

MVGQLSEGAIAAIMQKGDTNIKPILQVINIRPITTGNSPPRYRLLMSDGL
NTLSSFMLATQLNPLVEEEQLSSNCVCQIHRFIVNTLKDGRRVVILMELE
VLKSAEAVGVKIGNPVPYNEGLGQPQVAPPAPAASPAASSRPQPQNGSSG
MGSTVSKAYGASKTFGKAAGPSLSHTSGGTQSKVVPIASLTPYQSKWTIC
ARVTNKSQIRTWSNSRGEGKLFSLELVDESGEIRATAFNEQVDKFFPLIE
VNKVYYFSKGTLKIANKQFTAVKNDYEMTFNNETSVMPCEDDHHLPTVQF
DFTGIDDLENKSKDSLVDIIGICKSYEDATKITVRSNNREVAKRNIYLMD
TSGKVVTATLWGEDADKFDGSRQPVLAIKGARVSDFGGRSLSVLSSSTII
ANPDIPEAYKLRGWFDAEGQALDGVSISDLKSGGVGGSNTNWKTLYEVKS
ENLGQGDKPDYFSSVATVVYLRKENCMYQACPTQDCNKKVIDQQNGLYRC
EKCDTEFPNFKYRMILSVNIADFQENQWVTCFQESAEAILGQNAAYLGEL
KDKNEQAFEEVFQNANFRSFIFRVRVKVETYNDESRIKATVMDVKPVDYR
EYGRRLVMSIRRSALM

RPA 2—Replication protein A 32 kDa subunit (UniProtKB: P15927; NCBI Ref: NM_002946)

(SEQ ID NO: 141)

MWNSGFESYGSSSYGGAGGYTQSPGGFGSPAPSQAEKKSRARAQHIVPCT
ISQLLSATLVDEVFRIGNVEISQVTIVGIIRHAEKAPTNIVYKIDDMTAA
PMDVRQWVDTDDTSSENTVVPPETYVKVAGHLRSFQNKKSLVAFKIMPLE
DMNEFTTHILEVINAHMVLSKANSQPSAGRAPISNPGMSEAGNFGGNSFM
PANGLTVAQNQVLNLIKACPRPEGLNFQDLKNQLKHMSVSSIKQAVDFLS
NEGHIYSTVDDDHFKSTDAE

RPA 3—Replication protein A 14 kDa subunit (UniProtKB: P35244; NCBI Ref: NM_002947.4)

(SEQ ID NO: 142)

MVDMMDLPRSRINAGMLAQFIDKPVCFVGRLEKIHPTGKMFILSDGEGKN
GTIELMEPLDEEISGIVEVVGRVTAKATILCTSYVQFKEDSHPFDLGLYN
EAVKIIHDFPQFYPLGIVQHD

### Bacterial Single-Stranded DNA-Binding Proteins:

[0391] ssbA—single-stranded DNA-binding protein [Bacillus subtilis subsp. subtilis str. 168] (UniProtKB: P37455; NCBI Ref:)

(SEQ ID NO: 143)

MLNRVVLVGRLTKDPELRYTPNGAAVATFTLAVNRTFTNQSGEREADFIN
CVTWRRQAENVANFLKKGSLAGVDGRLQTRNYENQQGQRVFVTEVQAESV
QFLEPKNGGGSGSGGYNEGNSGGGQYFGGGQNDNPFGGNQNNQRRNQGNS
FNDDPFANDGKPIDISDDDLPF

Single-stranded DNA-binding protein 2 [Streptomyces coelicolor A3(2)] (UniProtKB: Q9X8U3; NCBI Ref: NP_628093.1)

(SEQ ID NO: 144)

MAGETVITVVGNLVDDPELRFTPSGAAVAKFRVASTPRTFDRQTNEWKDG
ESLFLTCSVWRQAAENVAESLQRGMRVIVQGRLKQRSYEDREGVKRTVYE
LDVDEVGASLRSATAKVTKTSGQGRGGQGGYGGGGGGQGGGGWGGGPGGG
QQGGGAPADDPWATGGAPAGGQQGGGGQGGGGWGGGSGGGGGYSDEPPF

Single-stranded DNA-binding protein [Streptococcus pneumoniae R6] (UniProtKB: P66855; NCBI Ref: NP_358988.1)

(SEQ ID NO: 145)

MINNVVLVGRMTRDAELRYTPSNVAVATFTLAVNRTFKSQNGEREADFIN
VVMWRQQAENLANWAKKGSLIGVTGRIQTRSYDNQQGQRVYVTEVVAENF
QMLESRSVREGHTGGAYSAPTANYSAPTNSVPDFSRNENPFGATNPLDIS
DDDLPF

### Viral Single-Stranded DNA-Binding Proteins:

[0392] Single-Stranded DNA-Binding Protein [Human Alphaherpesvirus 1] (UniProtKB: P04296; NCBI Ref: YP_009137104.1)

(SEQ ID NO: 146)

METKPKTATTIKVPPGPLGYVYARACPSEGIELLALLSARSGDSDVAVAP
LVVGLTVESGFEANVAVVVGSRTTGLGGTAVSLKLTPSHYSSSVYVFHGG
RHLDPSTQAPNLTRLCERARRHFGFSDYTPRPGDLKHETTGEALCERLGL
DPDRALLYLVVTEGFKEAVCINNTFLHLGGSDKVTIGGAEVHRIPVYPLQ
LFMPDFSRVIAEPFNANHRSIGENFTYPLPFFNRPLNRLLFEAVVGPAAV
ALRCRNVDAVARAAAHLAFDENHEGAALPADITFTAFEASQGKTPRGGRD
GGGKGPAGGFEQRLASVMAGDAALALESIVSMAVFDEPPTDISAWPLFEG
QDTAAARANAVGAYLARAAGLVGAMVFSTNSALHLTEVDDAGPADPKDHS
KPSFYRFFLVPGTHVAANPQVDREGHVVPGFEGRPTAPLVGGTQEFAGEH
LAMLCGFSPALLAKMLFYLERCDGGVIVGRQEMDVFRYVADSNQTDVPCN
LCTFDTRHACVHTTLMRLRARHPKFASAARGAIGVFGTMNSMYSDCDVLG
NYAAFSALKRADGSETARTIMQETYRAATERVMAELETLQYVDQAVPTAM
GRLETIITNREALHTVVNNVRQVVDREVEQLMRNLVEGRNFKFRDGLGEA
NHAMSLTLDPYACGPCPLLQLLGRRSNLAVYQDLALSQCHGVFAGQSVEG
RNFRNQFQPVLRRRVMDMFNNGFLSAKTLTVALSEGAAICAPSLTAGQTA
PAESSFEGDVARVTLGFPKELRVKSRVLFAGASANASEAAKARVASLQSA
YQKPDKRVDILLGPLGFLLKQFHAAIFPNGKPPGSNQPNPQWFWTALQRN
QLPARLLSREDIETIAFIKKFSLDYGAINFINLAPNNVSELAMYYMANQI
LRYCDHSTYFINTLTAIIAGSRRPPSVQAAAAWSAQGGAGLEAGARALMD
AVDAHPGAWTSMFASCNLLRPVMAARPMVVLGLSISKYYGMAGNDRVFQA
GNWASLMGGKNACPLLIFDRTRKFVLACPRAGFVCAASSLGGGAHESSLC
EQLRGIISEGGAAVASSVFVATVKSLGPRTQQLQIEDWLALLEDEYLSEE
MMELTARALERGNGEWSTDAALEVAHEAEALVSQLGNAGEVFNFGDFGCE
DDNATPFGGPGAPGPAFAGRKRAFHGDDPFGEGPPDKKGDLTLDML

Single-stranded DNA-binding protein from Bacillus virus phi29 (UniProtKB: Q38504.1; NCBI Ref: YP_002004532.1)

(SEQ ID NO: 147)

MENTNIVKATFDTETLEGQIKIFNAQTGGGQSFKNLPDGTIIEANAIAQY
KQVSDTYGDAKEETVTTIFAADGSLYSAISKTVAEAASDLIDLVTRHKLE
TFKVKVVQGTSSKGNVFFSLQLSL

Single stranded DNA binding protein [Burkholderia virus DC1] (UniProtKB: I6NRL7; NCBI Ref: YP_006589943.1)

(SEQ ID NO: 148)

MASVNKVILVGNLGADPETRYLPSGDAISNIRLATTDRYKDKASGEMKES
TEWHRVSFFGRLAEIVDEYLRKGAPVYIEGRIRTRKWQDNAGQDRYTTEI
VAEKMQMLGDRRDGGERQQRAPQQQQQRTQRNGYADATGRAQPSQRPAAG
GGFDEMDDDIPF

[0393] In some embodiments, the nucleic acid editing domain is a deaminase domain. In some embodiments, the deaminase is a cytosine deaminase or a cytidine deaminase. In some embodiments, the deaminase is an apolipoprotein B mRNA-editing complex (APOBEC) family deaminase. In some embodiments, the deaminase is an APOBEC1 deaminase. In some embodiments, the deaminase is an APOBEC2 deaminase. In some embodiments, the deaminase is an APOBEC3 deaminase. In some embodiments, the deaminase is an APOBEC3A deaminase. In some embodiments, the deaminase is an APOBEC3B deaminase. In some embodiments, the deaminase is an APOBEC3C deaminase. In some embodiments, the deaminase is an APOBEC3D deaminase. In some embodiments, the deaminase is an APOBEC3E deaminase. In some embodiments, the deaminase is an APOBEC3F deaminase. In some embodiments, the deaminase is an APOBEC3G deaminase. In some embodiments, the deaminase is an APOBEC3H deaminase. In some embodiments, the deaminase is an APOBEC4 deaminase. In some embodiments, the deaminase is an activation-induced deaminase (AID). In some embodiments, the demianse is a rat APOBEC1 (SEQ ID NO: 74). In some embodiments, the deminase is a human APOBEC1 (SEQ ID No: 76). In some embodiments, the deaminase is a Petromyzon marinus cytidine deaminase 1 (pmCDA1). In some embodiments, the deminase is a human APOBEC3G (SEQ ID NO: 60). In some embodiments, the deaminase is a fragment of the human APOBEC3G (SEQ ID NO: 83). In some embodiments, the deaminase is a human APOBEC3G variant comprising a D316R_D317R mutation (SEQ ID NO: 82). In some embodiments, the deaminase is a frantment of the human APOBEC3G and comprising mutations corresponding to the D316R_D317R mutations in SEQ ID NO: 60 (SEQ ID NO: 84).

[0394] In some embodiments, the linker comprises a (GGGS)ₙ (SEQ ID NO: 613), (GGGGS)ₙ (SEQ ID NO: 607), a (G)ₙ (SEQ ID NO: 608), an (EAAAK)ₙ (SEQ ID NO: 609), a (GGS)ₙ (SEQ ID NO: 610), an SGSETPGTSESATPES (SEQ ID NO: 604), or an (XP)ₙ (SEQ ID NO: 611) motif, or a combination of any of these, wherein n is independently an integer between 1 and 30.

[0395] Suitable UGI protein and nucleotide sequences are provided herein and additional suitable UGI sequences are known to those in the art, and include, for example, those published in Wang et al., Uracil-DNA glycosylase inhibitor gene of bacteriophage PBS2 encodes a binding protein specific for uracil-DNA glycosylase. J. Biol. Chem. 264:1163-1171(1989); Lundquist et al., Site-directed mutagenesis and characterization of uracil-DNA glycosylase inhibitor protein. Role of specific carboxylic amino acids in complex formation with Escherichia coli uracil-DNA glycosylase. J. Biol. Chem. 272:21408-21419(1997); Ravishankar et al., X-ray analysis of a complex of Escherichia coli uracil DNA glycosylase (EcUDG) with a proteinaceous inhibitor. The structure elucidation of a prokaryotic UDG. Nucleic Acids Res. 26:4880-4887(1998); and Putnam et al., Protein mimicry of DNA from crystal structures of the uracil-DNA glycosylase inhibitor protein and its complex with Escherichia coli uracil-DNA glycosylase. J. Mol. Biol. 287:331-346(1999), the entire contents of which are incorporated herein by reference. In some embodiments, the optional linker comprises a (GGS)ₙ (SEQ ID NO: 610) motif, wherein n is 1, 2, 3, 4, 5, 6, 7, 8, 9, 19, 11, 12, 13, 14, 15, 16, 17, 18, 19, or 20. In some embodiments, the optional linker comprises a (GGS)ₙ (SEQ ID NO: 610) motif, wherein n is 1, 3, or 7. In some embodiments, the optional linker comprises the amino acid sequence SGSETPGTSESATPES (SEQ ID NO: 604), which is also referred to as the XTEN linker in the Examples.

[0396] In some embodiments, a Cas9 nickase may further facilitate the removal of a base on the non-edited strand in an organism whose genome is edited in vivo. The Cas9 nickase, as described herein, may comprise a D10A mutation in SEQ ID NO: 6, or a corresponding mutation in any Cas9 protein, such as any one of the Cas9 amino acid sequences as provided herein. In some embodiments, the Cas9 nickase of this disclosure may comprise a histidine at mutation 840 of SEQ ID NO: 6, or a corresponding residue in any Cas9 protein, such as any one of the Cas9 amino acid sequences as provided herein. Such fusion proteins comprising the Cas9 nickase, can cleave a single strand of the target DNA sequence, e.g., the strand that is not being edited. Without wishing to be bound by any particular theory, this cleavage may inhibit mis-match repair mechanisms that reverse a C to U edit made by the deaminase.

Cas9 Complexes with Guide RNAs

[0397] Some aspects of this disclosure provide complexes comprising any of the fusion proteins provided herein, and a guide RNA bound to a Cas9 domain (e.g., a dCas9, a nuclease active Cas9, or a Cas9 nickase) of fusion protein.

[0398] In some embodiments, the guide RNA is from 15-100 nucleotides long and comprises a sequence of at least 10 contiguous nucleotides that is complementary to a target sequence. In some embodiments, the guide RNA is 15, 16, 17, 18, 19, 20, 21, 22, 23, 24, 25, 26, 27, 28, 29, 30, 31, 32, 33, 34, 35, 36, 37, 38, 39, 40, 41, 42, 43, 44, 45, 46, 47, 48, 49, or 50 nucleotides long. In some embodiments, the guide RNA comprises a sequence of 15, 16, 17, 18, 19, 20, 21, 22, 23, 24, 25, 26, 27, 28, 29, 30, 31, 32, 33, 34, 35, 36, 37, 38, 39, or 40 contiguous nucleotides that is complementary to a target sequence. In some embodiments, the target sequence is a DNA sequence. In some embodiments, the target sequence is a sequence in the genome of a mammal. In some embodiments, the target sequence is a sequence in the genome of a human. In some embodiments, the 3′ end of the target sequence is immediately adjacent to a canonical PAM sequence (NGG). In some embodiments, the guide RNA is complementary to a sequence associated with a disease or disorder.

### Methods of Using Cas9 Fusion Proteins

[0399] Some aspects of this disclosure provide methods of using the Cas9 proteins, fusion proteins, or complexes provided herein. For example, some aspects of this disclosure provide methods comprising contacting a DNA molecule (a) with any of the the Cas9 proteins or fusion proteins provided herein, and with at least one guide RNA, wherein the guide RNA is about 15-100 nucleotides long and comprises a sequence of at least 10 contiguous nucleotides that is complementary to a target sequence; or (b) with a Cas9 protein, a Cas9 fusion protein, or a Cas9 protein or fusion protein complex with at least one gRNA as provided herein. In some embodiments, the 3′ end of the target sequence is not immediately adjacent to a canonical PAM sequence (NGG). In some embodiments, the 3′ end of the target sequence is immediately adjacent to an AGC, GAG, TTT, GTG, or CAA sequence.

[0400] In some embodiments, the target DNA sequence comprises a sequence associated with a disease or disorder. In some embodiments, the target DNA sequence comprises a point mutation associated with a disease or disorder. In some embodiments, the activity of the Cas9 protein, the Cas9 fusion protein, or the complex results in a correction of the point mutation. In some embodiments, the target DNA sequence comprises a T→C point mutation associated with a disease or disorder, and wherein the deamination of the mutant C base results in a sequence that is not associated with a disease or disorder. In some embodiments, the target DNA sequence encodes a protein and wherein the point mutation is in a codon and results in a change in the amino acid encoded by the mutant codon as compared to the wild-type codon. In some embodiments, the deamination of the mutant C results in a change of the amino acid encoded by the mutant codon. In some embodiments, the deamination of the mutant C results in the codon encoding the wild-type amino acid. In some embodiments, the contacting is in vivo in a subject. In some embodiments, the subject has or has been diagnosed with a disease or disorder. In some embodiments, the disease or disorder is cystic fibrosis, phenylketonuria, epidermolytic hyperkeratosis (EHK), Charcot-Marie-Toot disease type 4J, neuroblastoma (NB), von Willebrand disease (vWD), myotonia congenital, hereditary renal amyloidosis, dilated cardiomyopathy (DCM), hereditary lymphedema, familial Alzheimer's disease, HIV, Prion disease, chronic infantile neurologic cutaneous articular syndrome (CINCA), desmin-related myopathy (DRM), a neoplastic disease associated with a mutant PI3KCA protein, a mutant CTNNB1 protein, a mutant HRAS protein, or a mutant p53 protein.

[0401] Some embodiments provide methods for using the Cas9 DNA editing fusion proteins provided herein. In some embodiments, the fusion protein is used to introduce a point mutation into a nucleic acid by deaminating a target nucleobase, e.g., a C residue. In some embodiments, the deamination of the target nucleobase results in the correction of a genetic defect, e.g., in the correction of a point mutation that leads to a loss of function in a gene product. In some embodiments, the genetic defect is associated with a disease or disorder, e.g., a lysosomal storage disorder or a metabolic disease, such as, for example, type I diabetes. In some embodiments, the methods provided herein are used to introduce a deactivating point mutation into a gene or allele that encodes a gene product that is associated with a disease or disorder. For example, in some embodiments, methods are provided herein that employ a Cas9 DNA editing fusion protein to introduce a deactivating point mutation into an oncogene (e.g., in the treatment of a proliferative disease). A deactivating mutation may, in some embodiments, generate a premature stop codon in a coding sequence, which results in the expression of a truncated gene product, e.g., a truncated protein lacking the function of the full-length protein.

[0402] In some embodiments, the purpose of the methods provide herein is to restore the function of a dysfunctional gene via genome editing. The Cas9 deaminase fusion proteins provided herein can be validated for gene editing-based human therapeutics in vitro, e.g., by correcting a disease-associated mutation in human cell culture. It will be understood by the skilled artisan that the fusion proteins provided herein, e.g., the fusion proteins comprising a Cas9 domain and a nucleic acid deaminase domain can be used to correct any single point T->C or A->G mutation. In the first case, deamination of the mutant C back to U corrects the mutation, and in the latter case, deamination of the C that is base-paired with the mutant G, followed by a round of replication, corrects the mutation.

[0403] An exemplary disease-relevant mutation that can be corrected by the provided fusion proteins in vitro or in vivo is the H1047R (A3140G) polymorphism in the PI3KCA protein. The phosphoinositide-3-kinase, catalytic alpha subunit (PI3KCA) protein acts to phosphorylate the 3-OH group of the inositol ring of phosphatidylinositol. The PI3KCA gene has been found to be mutated in many different carcinomas, and thus it is considered to be a potent oncogene.³⁷ In fact, the A3140G mutation is present in several NCI-60 cancer cell lines, such as, for example, the HCT116, SKOV3, and T47D cell lines, which are readily available from the American Type Culture Collection (ATCC).³⁸

[0404] In some embodiments, a cell carrying a mutation to be corrected, e.g., a cell carrying a point mutation, e.g., an A3140G point mutation in exon 20 of the PI3KCA gene, resulting in a H1047R substitution in the PI3KCA protein, is contacted with an expression construct encoding a Cas9 deaminase fusion protein and an appropriately designed sgRNA targeting the fusion protein to the respective mutation site in the encoding PI3KCA gene. Control experiments can be performed where the sgRNAs are designed to target the fusion enzymes to non-C residues that are within the PI3KCA gene. Genomic DNA of the treated cells can be extracted, and the relevant sequence of the PI3KCA genes PCR amplified and sequenced to assess the activities of the fusion proteins in human cell culture.

[0405] It will be understood that the example of correcting point mutations in PI3KCA is provided for illustration purposes and is not meant to limit the instant disclosure. The skilled artisan will understand that the instantly disclosed DNA-editing fusion proteins can be used to correct other point mutations and mutations associated with other cancers and with diseases other than cancer including other proliferative diseases.

[0406] The successful correction of point mutations in disease-associated genes and alleles opens up new strategies for gene correction with applications in therapeutics and basic research. Site-specific single-base modification systems like the disclosed fusions of Cas9 and deaminase enzymes or domains also have applications in “reverse” gene therapy, where certain gene functions are purposely suppressed or abolished. In these cases, site-specifically mutating Trp (TGG), Gln (CAA and CAG), or Arg (CGA) residues to premature stop codons (TAA, TAG, TGA) can be used to abolish protein function in vitro, ex vivo, or in vivo.

[0407] The instant disclosure provides methods for the treatment of a subject diagnosed with a disease associated with or caused by a point mutation that can be corrected by a Cas9 DNA editing fusion protein provided herein. For example, in some embodiments, a method is provided that comprises administering to a subject having such a disease, e.g., a cancer associated with a PI3KCA point mutation as described above, an effective amount of a Cas9 deaminase fusion protein that corrects the point mutation or introduces a deactivating mutation into the disease-associated gene. In some embodiments, the disease is a proliferative disease. In some embodiments, the disease is a genetic disease. In some embodiments, the disease is a neoplastic disease. In some embodiments, the disease is a metabolic disease. In some embodiments, the disease is a lysosomal storage disease. Other diseases that can be treated by correcting a point mutation or introducing a deactivating mutation into a disease-associated gene will be known to those of skill in the art, and the disclosure is not limited in this respect.

[0408] The instant disclosure provides methods for the treatment of additional diseases or disorders, e.g., diseases or disorders that are associated or caused by a point mutation that can be corrected by deaminase-mediated gene editing. Some such diseases are described herein, and additional suitable diseases that can be treated with the strategies and fusion proteins provided herein will be apparent to those of skill in the art based on the instant disclosure. Exemplary suitable diseases and disorders are listed below. It will be understood that the numbering of the specific positions or residues in the respective sequences depends on the particular protein and numbering scheme used. Numbering might be different, e.g., in precursors of a mature protein and the mature protein itself, and differences in sequences from species to species may affect numbering. One of skill in the art will be able to identify the respective residue in any homologous protein and in the respective encoding nucleic acid by methods well known in the art, e.g., by sequence alignment and determination of homologous residues. Exemplary suitable diseases and disorders include, without limitation, cystic fibrosis (see, e.g., Schwank et al., Functional repair of CFTR by CRISPR/Cas9 in intestinal stem cell organoids of cystic fibrosis patients. Cell stem cell. 2013; 13: 653-658; and Wu et. al., Correction of a genetic disease in mouse via use of CRISPR-Cas9. Cell stem cell. 2013; 13: 659-662, neither of which uses a deaminase fusion protein to correct the genetic defect); phenylketonuria—e.g., phenylalanine to serine mutation at position 835 (mouse) or 240 (human) or a homologous residue in phenylalanine hydroxylase gene (T>C mutation)—see, e.g., McDonald et al., Genomics. 1997; 39:402-405; Bernard-Soulier syndrome (BSS)—e.g., phenylalanine to serine mutation at position 55 or a homologous residue, or cysteine to arginine at residue 24 or a homologous residue in the platelet membrane glycoprotein IX (T>C mutation)—see, e.g., Noris et al., British Journal of Haematology. 1997; 97: 312-320, and Ali et al., Hematol. 2014; 93: 381-384; epidermolytic hyperkeratosis (EHK)—e.g., leucine to proline mutation at position 160 or 161 (if counting the initiator methionine) or a homologous residue in keratin 1 (T>C mutation)—see, e.g., Chipev et al., Cell. 1992; 70: 821-828, see also accession number P04264 in the UNIPROT database at www[dot]uniprot[dot]org; chronic obstructive pulmonary disease (COPD)—e.g., leucine to proline mutation at position 54 or 55 (if counting the initiator methionine) or a homologous residue in the processed form of α₁-antitrypsin or residue 78 in the unprocessed form or a homologous residue (T>C mutation)—see, e.g., Poller et al., Genomics. 1993; 17: 740-743, see also accession number P01011 in the UNIPROT database; Charcot-Marie-Toot disease type 4J—e.g., isoleucine to threonine mutation at position 41 or a homologous residue in FIG. 4 (T>C mutation)—see, e.g., Lenk et al., PLoS Genetics. 2011; 7: e1002104; neuroblastoma (NB)—e.g., leucine to proline mutation at position 197 or a homologous residue in Caspase-9 (T>C mutation)—see, e.g., Kundu et al., 3 Biotech. 2013, 3:225-234; von Willebrand disease (vWD)—e.g., cysteine to arginine mutation at position 509 or a homologous residue in the processed form of von Willebrand factor, or at position 1272 or a homologous residue in the unprocessed form of von Willebrand factor (T>C mutation)—see, e.g., Lavergne et al., Br. J. Haematol. 1992, see also accession number P04275 in the UNIPROT database; 82: 66-72; myotonia congenital—e.g., cysteine to arginine mutation at position 277 or a homologous residue in the muscle chloride channel gene CLCN1 (T>C mutation)—see, e.g., Weinberger et al., The J. of Physiology. 2012; 590: 3449-3464; hereditary renal amyloidosis—e.g., stop codon to arginine mutation at position 78 or a homologous residue in the processed form of apolipoprotein AII or at position 101 or a homologous residue in the unprocessed form (T>C mutation)—see, e.g., Yazaki et al., Kidney Int. 2003; 64: 11-16; dilated cardiomyopathy (DCM)—e.g., tryptophan to Arginine mutation at position 148 or a homologous residue in the FOXD4 gene (T>C mutation), see, e.g., Minoretti et. al., Int. J. of Mol. Med. 2007; 19: 369-372; hereditary lymphedema—e.g., histidine to arginine mutation at position 1035 or a homologous residue in VEGFR3 tyrosine kinase (A>G mutation), see, e.g., Irrthum et al., Am. J. Hum. Genet. 2000; 67: 295-301; familial Alzheimer's disease—e.g., isoleucine to valine mutation at position 143 or a homologous residue in presenilinl (A>G mutation), see, e.g., Gallo et. al., J. Alzheimer's disease. 2011; 25: 425-431; Prion disease—e.g., methionine to valine mutation at position 129 or a homologous residue in prion protein (A>G mutation)—see, e.g., Lewis et. al., J. of General Virology. 2006; 87: 2443-2449; chronic infantile neurologic cutaneous articular syndrome (CINCA)—e.g., Tyrosine to Cysteine mutation at position 570 or a homologous residue in cryopyrin (A>G mutation)—see, e.g., Fujisawa et. al. Blood. 2007; 109: 2903-2911; and desmin-related myopathy (DRM)—e.g., arginine to glycine mutation at position 120 or a homologous residue in αβ crystallin (A>G mutation)—see, e.g., Kumar et al., J. Biol. Chem. 1999; 274: 24137-24141. The entire contents of all references and database entries is incorporated herein by reference.

[0409] It will be apparent to those of skill in the art that in order to target a Cas9:nucleic acid editing enzyme/domain fusion protein as disclosed herein to a target site, e.g., a site comprising a point mutation to be edited, it is typically necessary to co-express the Cas9:nucleic acid editing enzyme/domain fusion protein together with a guide RNA, e.g., an sgRNA. As explained in more detail elsewhere herein, a guide RNA typically comprises a tracrRNA framework allowing for Cas9 binding, and a guide sequence, which confers sequence specificity to the Cas9:nucleic acid editing enzyme/domain fusion protein. In some embodiments, the guide RNA comprises a structure 5′-[guide sequence]-guuuuagagcuagaaauagcaaguuaaaauaaggcuaguccguuaucaacuugaaaaaguggcaccgagucggugcuuuu u-3′ (SEQ ID NO: 618), wherein the guide sequence comprises a sequence that is complementary to the target sequence. The guide sequence is typically 20 nucleotides long. The sequences of suitable guide RNAs for targeting Cas9:nucleic acid editing enzyme/domain fusion proteins to specific genomic target sites will be apparent to those of skill in the art based on the instant disclosure. Such suitable guide RNA sequences typically comprise guide sequences that are complementary to a nucleic sequence within 50 nucleotides upstream or downstream of the target nucleotide to be edited. Some exemplary guide RNA sequences suitable for targeting Cas9:nucleic acid editing enzyme/domain fusion proteins to specific target sequences are provided below.

### Base Editor Efficiency

[0410] Some aspects of the disclosure are based on the recognition that any of the base editors provided herein are capable of modifying a specific nucleotide base without generating a significant proportion of indels. An “indel”, as used herein, refers to the insertion or deletion of a nucleotide base within a nucleic acid. Such insertions or deletions can lead to frame shift mutations within a coding region of a gene. In some embodiments, it is desirable to generate base editors that efficiently modify (e.g. mutate or deaminate) a specific nucleotide within a nucleic acid, without generating a large number of insertions or deletions (i.e., indels) in the nucleic acid. In certain embodiments, any of the base editors provided herein are capable of generating a greater proportion of intended modifications (e.g., point mutations or deaminations) versus indels. In some embodiments, the base editors provided herein are capable of generating a ratio of intended point mutations to indels that is greater than 1:1. In some embodiments, the base editors provided herein are capable of generating a ratio of intended point mutations to indels that is at least 1.5:1, at least 2:1, at least 2.5:1, at least 3:1, at least 3.5:1, at least 4:1, at least 4.5:1, at least 5:1, at least 5.5:1, at least 6:1, at least 6.5:1, at least 7:1, at least 7.5:1, at least 8:1, at least 10:1, at least 12:1, at least 15:1, at least 20:1, at least 25:1, at least 30:1, at least 40:1, at least 50:1, at least 100:1, at least 200:1, at least 300:1, at least 400:1, at least 500:1, at least 600:1, at least 700:1, at least 800:1, at least 900:1, or at least 1000:1, or more. The number of intended mutations and indels may be determined using any suitable method, for example the methods used in the below Examples.

[0411] In some embodiments, the base editors provided herein are capable of limiting formation of indels in a region of a nucleic acid. In some embodiments, the region is at a nucleotide targeted by a base editor or a region within 2, 3, 4, 5, 6, 7, 8, 9, or 10 nucleotides of a nucleotide targeted by a base editor. In some embodiments, any of the base editors provided herein are capable of limiting the formation of indels at a region of a nucleic acid to less than 1%, less than 1.5%, less than 2%, less than 2.5%, less than 3%, less than 3.5%, less than 4%, less than 4.5%, less than 5%, less than 6%, less than 7%, less than 8%, less than 9%, less than 10%, less than 12%, less than 15%, or less than 20%. The number of indels formed at a nucleic acid region may depend on the amount of time a nucleic acid (e.g., a nucleic acid within the genome of a cell) is exposed to a base editor. In some embodiments, an number or proportion of indels is determined after at least 1 hour, at least 2 hours, at least 6 hours, at least 12 hours, at least 24 hours, at least 36 hours, at least 48 hours, at least 3 days, at least 4 days, at least 5 days, at least 7 days, at least 10 days, or at least 14 days of exposing a nucleic acid (e.g., a nucleic acid within the genome of a cell) to a base editor.

[0412] Some aspects of the disclosure are based on the recognition that any of the base editors provided herein are capable of efficiently generating an intended mutation, such as a point mutation, in a nucleic acid (e.g. a nucleic acid within a genome of a subject) without generating a significant number of unintended mutations, such as unintended point mutations. In some embodiments, a intended mutation is a mutation that is generated by a specific base editor bound to a gRNA, specifically designed to generate the intended mutation. In some embodiments, the intended mutation is a mutation associated with a disease or disorder. In some embodiments, the intended mutation is a cytosine (C) to thymine (T) point mutation associated with a disease or disorder. In some embodiments, the intended mutation is a guanine (G) to adenine (A) point mutation associated with a disease or disorder. In some embodiments, the intended mutation is a cytosine (C) to thymine (T) point mutation within the coding region of a gene. In some embodiments, the intended mutation is a guanine (G) to adenine (A) point mutation within the coding region of a gene. In some embodiments, the intended mutation is a point mutation that generates a stop codon, for example, a premature stop codon within the coding region of a gene. In some embodiments, the intended mutation is a mutation that eliminates a stop codon. In some embodiments, the intended mutation is a mutation that alters the splicing of a gene. In some embodiments, the intended mutation is a mutation that alters the regulatory sequence of a gene (e.g., a gene promotor or gene repressor). In some embodiments, any of the base editors provided herein are capable of generating a ratio of intended mutations to unintended mutations (e.g., intended point mutations:unintended point mutations) that is greater than 1:1. In some embodiments, any of the base editors provided herein are capable of generating a ratio of intended mutations to unintended mutations (e.g., intended point mutations:unintended point mutations) that is at least 1.5:1, at least 2:1, at least 2.5:1, at least 3:1, at least 3.5:1, at least 4:1, at least 4.5:1, at least 5:1, at least 5.5:1, at least 6:1, at least 6.5:1, at least 7:1, at least 7.5:1, at least 8:1, at least 10:1, at least 12:1, at least 15:1, at least 20:1, at least 25:1, at least 30:1, at least 40:1, at least 50:1, at least 100:1, at least 150:1, at least 200:1, at least 250:1, at least 500:1, or at least 1000:1, or more. It should be appreciated that the characterstics of the base editors described in the “Base Editor Efficiency” section, herein, may be applied to any of the fusion proteins, or methods of using the fusion proteins provided herein.

### Methods for Editing Nucleic Acids

[0413] Some aspects of the disclosure provide methods for editing a nucleic acid. In some embodiments, the method is a method for editing a nucleobase of a nucleic acid (e.g., a base pair of a double-stranded DNA sequence). In some embodiments, the method comprises the steps of: a) contacting a target region of a nucleic acid (e.g., a double-stranded DNA sequence) with a complex comprising a base editor (e.g., a Cas9 domain fused to a cytidine deaminase domain) and a guide nucleic acid (e.g., gRNA), wherein the target region comprises a targeted nucleobase pair, b) inducing strand separation of said target region, c) converting a first nucleobase of said target nucleobase pair in a single strand of the target region to a second nucleobase, and d) cutting no more than one strand of said target region, where a third nucleobase complementary to the first nucleobase base is replaced by a fourth nucleobase complementary to the second nucleobase; and the method results in less than 20% indel formation in the nucleic acid. It should be appreciated that in some embodiments, step b is omitted. In some embodiments, the first nucleobase is a cytosine. In some embodiments, the second nucleobase is a deaminated cytosine, or a uracil. In some embodiments, the third nucleobase is a guanine. In some embodiments, the fourth nucleobase is an adenine. In some embodiments, the first nucleobase is a cytosine, the second nucleobase is a deaminated cytosine, or a uracil, the third nucleobase is a guanine, and the fourth nucleobase is an adenine. In some embodiments, the method results in less than 19%, 18%, 16%, 14%, 12%, 10%, 8%, 6%, 4%, 2%, 1%, 0.5%, 0.2%, or less than 0.1% indel formation. In some embodiments, the method further comprises replacing the second nucleobase with a fifth nucleobase that is complementary to the fourth nucleobase, thereby generating an intended edited base pair (e.g., C:G->T:A). In some embodiments, the fifth nucleobase is a thymine. In some embodiments, at least 5% of the intended basepaires are edited. In some embodiments, at least 10%, 15%, 20%, 25%, 30%, 35%, 40%, 45%, or 50% of the intended basepaires are edited.

[0414] In some embodiments, the ratio of intended products to unintended products in the target nucleotide is at least 2:1, 5:1, 10:1, 20:1, 30:1, 40:1, 50:1, 60:1, 70:1, 80:1, 90:1, 100:1, or 200:1, or more. In some embodiments, the ratio of intended point mutation to indel formation is greater than 1:1, 10:1, 50:1, 100:1, 500:1, or 1000:1, or more. In some embodiments, the cut single strand (nicked strand) is hybridized to the guide nucleic acid. In some embodiments, the cut single strand is opposite to the strand comprising the first nucleobase. In some embodiments, the base editor comprises a Cas9 domain. In some embodiments, the first base is cytosine, and the second base is not a G, C, A, or T. In some embodiments, the second base is uracil. In some embodiments, the first base is cytosine. In some embodiments, the second base is not a G, C, A, or T. In some embodiments, the second base is uracil. In some embodiments, the base editor inhibits base escision repair of the edited strand. In some embodiments, the base editor protects or binds the non-edited strand. In some embodiments, the base editor comprises UGI activity. In some embodiments, the base editor comprises nickase activity. In some embodiments, the intended edited basepair is upstream of a PAM site. In some embodiments, the intended edited base pair is 1, 2, 3, 4, 5, 6, 7, 8, 9, 10, 11, 12, 13, 14, 15, 16, 17, 18, 19, or 20 nucleotides upstream of the PAM site. In some embodiments, the intended edited basepair is downstream of a PAM site. In some embodiments, the intended edited base pair is 1, 2, 3, 4, 5, 6, 7, 8, 9, 10, 11, 12, 13, 14, 15, 16, 17, 18, 19, or 20 nucleotides downstream stream of the PAM site. In some embodiments, the method does not require a canonical (e.g., NGG) PAM site. In some embodiments, the nucleobase editor comprises a linker. In some embodiments, the linker is 1-25 amino acids in length. In some embodiments, the linker is 5-20 amino acids in length. In some embodiments, linker is 10, 11, 12, 13, 14, 15, 16, 17, 18, 19, or 20 amino acids in length. In some embodiments, the target region comprises a target window, wherein the target window comprises the target nucleobase pair. In some embodiments, the target window comprises 1-10 nucleotides. In some embodiments, the target window is 1-9, 1-8, 1-7, 1-6, 1-5, 1-4, 1-3, 1-2, or 1 nucleotides in length. In some embodiments, the target window is 1, 2, 3, 4, 5, 6, 7, 8, 9, 10, 11, 12, 13, 14, 15, 16, 17, 18, 19, or 20 nucleotides in length. In some embodiments, the intended edited base pair is within the target window. In some embodiments, the target window comprises the intended edited base pair. In some embodiments, the method is performed using any of the base editors provided herein. In some embodiments, a target windo is a deamination window

[0415] In some embodiments, the disclosure provides methods for editing a nucleotide. In some embodiments, the disclosure provides a method for editing a nucleobase pair of a double-stranded DNA sequence. In some embodiments, the method comprises a) contacting a target region of the double-stranded DNA sequence with a complex comprising a base editor and a guide nucleic acid (e.g., gRNA), where the target region comprises a target nucleobase pair, b) inducing strand separation of said target region, c) converting a first nucleobase of said target nucleobase pair in a single strand of the target region to a second nucleobase, d) cutting no more than one strand of said target region, wherein a third nucleobase complementary to the first nucleobase base is replaced by a fourth nucleobase complementary to the second nucleobase, and the second nucleobase is replaced with a fifth nucleobase that is complementary to the fourth nucleobase, thereby generating an intended edited basepair, wherein the efficiency of generating the intended edited basepair is at least 5%. It should be appreciated that in some embodiments, step b is omitted. In some embodiments, at least 5% of the intended basepaires are edited. In some embodiments, at least 10%, 15%, 20%, 25%, 30%, 35%, 40%, 45%, or 50% of the intended basepaires are edited. In some embodiments, the method causes less than 19%, 18%, 16%, 14%, 12%, 10%, 8%, 6%, 4%, 2%, 1%, 0.5%, 0.2%, or less than 0.1% indel formation. In some embodiments, the ratio of intended product to unintended products at the target nucleotide is at least 2:1, 5:1, 10:1, 20:1, 30:1, 40:1, 50:1, 60:1, 70:1, 80:1, 90:1, 100:1, or 200:1, or more. In some embodiments, the ratio of intended point mutation to indel formation is greater than 1:1, 10:1, 50:1, 100:1, 500:1, or 1000:1, or more. In some embodiments, the cut single strand is hybridized to the guide nucleic acid. In some embodiments, the cut single strand is opposite to the strand comprising the first nucleobase. In some embodiments, the first base is cytosine. In some embodiments, the second nucleobase is not G, C, A, or T. In some embodiments, the second base is uracil. In some embodiments, the base editor inhibits base escision repair of the edited strand. In some embodiments, the base editor protects or binds the non-edited strand. In some embodiments, the nucleobase editor comprises UGI activity. In some embodiments, the nucleobase edit comprises nickase activity. In some embodiments, the intended edited basepair is upstream of a PAM site. In some embodiments, the intended edited base pair is 1, 2, 3, 4, 5, 6, 7, 8, 9, 10, 11, 12, 13, 14, 15, 16, 17, 18, 19, or 20 nucleotides upstream of the PAM site. In some embodiments, the intended edited basepair is downstream of a PAM site. In some embodiments, the intended edited base pair is 1, 2, 3, 4, 5, 6, 7, 8, 9, 10, 11, 12, 13, 14, 15, 16, 17, 18, 19, or 20 nucleotides downstream stream of the PAM site. In some embodiments, the method does not require a canonical (e.g., NGG) PAM site. In some embodiments, the nucleobase editor comprises a linker. In some embodiments, the linker is 1-25 amino acids in length. In some embodiments, the linker is 5-20 amino acids in length. In some embodiments, the linker is 10, 11, 12, 13, 14, 15, 16, 17, 18, 19, or 20 amino acids in length. In some embodiments, the target region comprises a target window, wherein the target window comprises the target nucleobase pair. In some embodiments, the target window comprises 1-10 nucleotides. In some embodiments, the target window is 1-9, 1-8, 1-7, 1-6, 1-5, 1-4, 1-3, 1-2, or 1 nucleotides in length. In some embodiments, the target window is 1, 2, 3, 4, 5, 6, 7, 8, 9, 10, 11, 12, 13, 14, 15, 16, 17, 18, 19, or 20 nucleotides in length. In some embodiments, the intended edited base pair occurs within the target window. In some embodiments, the target window comprises the intended edited base pair. In some embodiments, the nucleobase editor is any one of the base editors provided herein.

### Pharmaceutical Compositions

[0416] In some embodiments, any of the fusion proteins, gRNAs, and/or complexes described herein are provided as part of a pharmaceutical composition. In some embodiments, the pharmaceutical composition comprises any of the fusion proteins provided herein. In some embodiments, the pharmaceutical composition comprises any of the complexes provided herein. In some embodiments, the pharmaceutical composition comprises a ribonucleoprotein complex comprising an RNA-guided nuclease (e.g., Cas9) that forms a complex with a gRNA and a cationic lipid. In some embodiments pharmaceutical composition comprises a gRNA, a nucleic acid programmable DNA binding protein, a cationic lipid, and a pharmaceutically acceptable excipient. Pharmaceutical compositions may optionally comprise one or more additional therapeutically active substances.

[0417] In some embodiments, compositions provided herein are administered to a subject, for example, to a human subject, in order to effect a targeted genomic modification within the subject. In some embodiments, cells are obtained from the subject and contacted with a any of the pharmaceutical compositions provided herein. In some embodiments, cells removed from a subject and contacted ex vivo with a pharmaceutical composition are re-introduced into the subject, optionally after the desired genomic modification has been effected or detected in the cells. Methods of delivering pharmaceutical compositions comprising nucleases are known, and are described, for example, in U.S. Pat. Nos. 6,453,242; 6,503,717; 6,534,261; 6,599,692; 6,607,882; 6,689,558; 6,824,978; 6,933,113; 6,979,539; 7,013,219; and 7,163,824, the disclosures of all of which are incorporated by reference herein in their entireties. Although the descriptions of pharmaceutical compositions provided herein are principally directed to pharmaceutical compositions which are suitable for administration to humans, it will be understood by the skilled artisan that such compositions are generally suitable for administration to animals or organisms of all sorts. Modification of pharmaceutical compositions suitable for administration to humans in order to render the compositions suitable for administration to various animals is well understood, and the ordinarily skilled veterinary pharmacologist can design and/or perform such modification with merely ordinary, if any, experimentation. Subjects to which administration of the pharmaceutical compositions is contemplated include, but are not limited to, humans and/or other primates; mammals, domesticated animals, pets, and commercially relevant mammals such as cattle, pigs, horses, sheep, cats, dogs, mice, and/or rats; and/or birds, including commercially relevant birds such as chickens, ducks, geese, and/or turkeys.

[0418] Formulations of the pharmaceutical compositions described herein may be prepared by any method known or hereafter developed in the art of pharmacology. In general, such preparatory methods include the step of bringing the active ingredient(s) into association with an excipient and/or one or more other accessory ingredients, and then, if necessary and/or desirable, shaping and/or packaging the product into a desired single- or multi-dose unit.

[0419] Pharmaceutical formulations may additionally comprise a pharmaceutically acceptable excipient, which, as used herein, includes any and all solvents, dispersion media, diluents, or other liquid vehicles, dispersion or suspension aids, surface active agents, isotonic agents, thickening or emulsifying agents, preservatives, solid binders, lubricants and the like, as suited to the particular dosage form desired. Remington's The Science and Practice of Pharmacy, 21^{st} Edition, A. R. Gennaro (Lippincott, Williams & Wilkins, Baltimore, Md., 2006; incorporated in its entirety herein by reference) discloses various excipients used in formulating pharmaceutical compositions and known techniques for the preparation thereof. See also PCT application PCT/US2010/055131 (Publication number WO2011053982 A8, filed Nov. 2, 2010), incorporated in its entirety herein by reference, for additional suitable methods, reagents, excipients and solvents for producing pharmaceutical compositions comprising a nuclease. Except insofar as any conventional excipient medium is incompatible with a substance or its derivatives, such as by producing any undesirable biological effect or otherwise interacting in a deleterious manner with any other component(s) of the pharmaceutical composition, its use is contemplated to be within the scope of this disclosure.

[0420] In some embodiments, compositions in accordance with the present invention may be used for treatment of any of a variety of diseases, disorders, and/or conditions, including but not limited to one or more of the following: autoimmune disorders (e.g. diabetes, lupus, multiple sclerosis, psoriasis, rheumatoid arthritis); inflammatory disorders (e.g. arthritis, pelvic inflammatory disease); infectious diseases (e.g. viral infections (e.g., HIV, HCV, RSV), bacterial infections, fungal infections, sepsis); neurological disorders (e.g. Alzheimer's disease, Huntington's disease; autism; Duchenne muscular dystrophy); cardiovascular disorders (e.g. atherosclerosis, hypercholesterolemia, thrombosis, clotting disorders, angiogenic disorders such as macular degeneration); proliferative disorders (e.g. cancer, benign neoplasms); respiratory disorders (e.g. chronic obstructive pulmonary disease); digestive disorders (e.g. inflammatory bowel disease, ulcers); musculoskeletal disorders (e.g. fibromyalgia, arthritis); endocrine, metabolic, and nutritional disorders (e.g. diabetes, osteoporosis); urological disorders (e.g. renal disease); psychological disorders (e.g. depression, schizophrenia); skin disorders (e.g. wounds, eczema); blood and lymphatic disorders (e.g. anemia, hemophilia); etc.

### Kits, Vectors, Cells

[0421] Some aspects of this disclosure provide kits comprising a nucleic acid construct, comprising (a) a nucleotide sequence encoding a Cas9 protein or a Cas9 fusion protein as provided herein; and (b) a heterologous promoter that drives expression of the sequence of (a). In some embodiments, the kit further comprises an expression construct encoding a guide RNA backbone, wherein the construct comprises a cloning site positioned to allow the cloning of a nucleic acid sequence identical or complementary to a target sequence into the guide RNA backbone.

[0422] Some aspects of this disclosure provide polynucleotides encoding a Cas9 protein of a fusion protein as provided herein. Some aspects of this disclosure provide vectors comprising such polynucleotides. In some embodiments, the vector comprises a heterologous promoter driving expression of polynucleotide.

[0423] Some aspects of this disclosure provide cells comprising a Cas9 protein, a fusion protein, a nucleic acid molecule encoding the fusion protein, a complex comprise the Cas9 protein and the gRNA, and/or a vector as provided herein.

[0424] The description of exemplary embodiments of the reporter systems above is provided for illustration purposes only and not meant to be limiting. Additional reporter systems, e.g., variations of the exemplary systems described in detail above, are also embraced by this disclosure.

### EXAMPLES

### Example 1: Cas9 Deaminase Fusion Proteins

[0425] A number of Cas9:Deaminase fusion proteins were generated and deaminase activity of the generated fusions was characterized. The following deaminases were tested:

Human AID (hAID):

(SEQ ID NO: 49)

MDSLLMNRRKFLYQFKNVRWAKGRRETYLCYVVKRRDSATSFSLDFGYLR
NKNGCHVELLFLRYISDWDLDPGRCYRVTWFTSWSPCYDCARHVADFLRG
NPYLSLRIFTARLYFCEDRKAEPEGLRRLHRAGVQIAIMTFKDYFYCWNT
FVENHERTFKAWEGLHENSVRLSRQLRRILLPLYEVDDLRDAFRTLGLLD

Human AID-DC (hAID-DC, truncated version of hAID with 7-fold increased activity):

(SEQ ID NO: 50)

MDSLLMNRRKFLYQFKNVRWAKGRRETYLCYVVKRRDSATSFSLDFGYLR
NKNGCHVELLFLRYISDWDLDPGRCYRVTWFTSWSPCYDCARHVADFLRG
NPNLSLRIFTARLYFCEDRKAEPEGLRRLHRAGVQIAIMTFKDYFYCWNT
FVENHERTFKAWEGLHENSVRLSRQLRRILL

Rat APOBEC1 (rAPOBEC1):

(SEQ ID NO: 76)

[sequence omitted]

Human APOBEC1 (hAPOBEC1)

(SEQ ID NO: 74)

MTSEKGPSTGDPTLRRRIEPWEFDVFYDPRELRKEACLLYEIKWGMSRKI
WRSSGKNTTNHVEVNFIKKFTSERDFHPSMSCSITWFLSWSPCWECSQAI
REFLSRHPGVTLVIYVARLFWHMDQQNRQGLRDLVNSGVTIQIMRASEYY
HCWRNFVNYPPGDEAHWPQYPPLWMMLYALELHCIILSLPPCLKISRRWQ
NHLTFFRLHLQNCHYQTIPPHILLATGLIHPSVAWR

Petromyzon marinus (Lamprey) CDA1 (pmCDA1):

(SEQ ID NO: 81)

MTDAEYVRIHEKLDIYTFKKQFFNNKKSVSHRCYVLFELKRRGERRACFW
GYAVNKPQSGTERGIHAEIFSIRKVEEYLRDNPGQFTINWYSSWSPCADC
AEKILEWYNQELRGNGHTLKIWACKLYYEKNARNQIGLWNLRDNGVGLNV
MVSEHYQCCRKIFIQSSHNQLNENRWLEKTLKRAEKRRSELSIMIQVKIL
HTTKSPAV

Human APOBEC3G (hAPOBEC3G):

(SEQ ID NO: 60)

MELKYHPEMRFFHWFSKWRKLHRDQEYEVTWYISWSPCTKCTRDMATFLA
EDPKVTLTIFVARLYYFWDPDYQEALRSLCQKRDGPRATMKIMNYDEFQH
CWSKFVYSQRELFEPWNNLPKYYILLHIMLGEILRHSMDPPTFTFNFNNE
PWVRGRHETYLCYEVERMHNDTWVLLNQRRGFLCNQAPHKHGFLEGRHAE
LCFLDVIPFWKLDLDQDYRVTCFTSWSPCFSCAQEMAKFISKNKHVSLCI
FTARIYDDQGRCQEGLRTLAEAGAKISIMTYSEFKHCWDTFVDHQGCPFQ
PWDGLDEHSQDLSGRLRAILQNQEN

[0426] Deaminase Activity on ssDNA. A USER (Uracil-Specific Excision Reagent) Enzyme-based assay for deamination was employed to test the activity of various deaminases on single-stranded DNA (ssDNA) substrates. USER Enzyme was obtained from New England Biolabs. An ssDNA substrate was provided with a target cytosine residue at different positions. Deamination of the ssDNA cytosine target residue results in conversion of the target cytosine to a uracil. The USER Enzyme excises the uracil base and cleaves the ssDNA backbone at that position, cutting the ssDNA substrate into two shorter fragments of DNA. In some assays, the ssDNA substrate is labeled on one end with a dye, e.g., with a 5′ Cy3 label (the * in the scheme below). Upon deamination, excision, and cleavage of the strand, the substrate can be subjected to electrophoresis, and the substrate and any fragment released from it can be visualized by detecting the label. Where Cy5 is images, only the fragment with the label will be visible via imaging.

[0427] In one USER Enzyme assay, ssDNA substrates were used that matched the target sequences of the various deaminases tested. Expression cassettes encoding the deaminases tested were inserted into a CMV backbone plasmid that has been used previously in the lab (Addgene plasmid 52970). The deaminase proteins were expressed using a TNT Quick Coupled Transcription/Translation System (Promega) according to the manufacturers recommendations. After 90 min of incubation, 5 mL of lysate was incubated with 5′ Cy3-labeled ssDNA substrate and 1 unit of USER Enzyme (NEB) for 3 hours. The DNA was resolved on a 10% TBE PAGE gel and the DNA was imaged using Cy-dye imaging. A schematic reparesentation of the USER Enzyme assay is shown in FIG. 41.

[0428] FIG. 1 shows the deaminase activity of the tested deaminases on ssDNA substrates, such as Doench 1, Doench 2, G7′ and VEGF Target 2. The rAPOBEC1 enzyme exhibited a substantial amount of deamination on the single-stranded DNA substrate with a canonical NGG PAM, but not with a negative control non-canonical NNN PAM.

Cas9 fusion proteins with APOBEC family deaminases were generated. The following fusion architectures were constructed and tested on ssDNA:

rAPOBEC1-GGS-dCas9 primary sequence
(SEQ ID NO: 149)
MSSETGPVAVDPTLRRRIEPHEFEVFFDPRELRKETCLLYEINWGGRHSIWRHTSQNTN
KHVEVNFIEKFTTERYFCPNTRCSITWFLSWSPCGECSRAITEFLSRYPHVTLFIYIARL
YHHADPRNRQGLRDLISSGVTIQIMTEQESGYCWRNFVNYSPSNEAHWPRYPHLWVR

[chemical structure]

[chemical structure]

[chemical structure]

[chemical structure]

[chemical structure]

[chemical structure]

[chemical structure]

[chemical structure]

[chemical structure]

[chemical structure]

[chemical structure]

[chemical structure]

[chemical structure]

[chemical structure]

[chemical structure]

[chemical structure]

[chemical structure]

[chemical structure]

[chemical structure]

[chemical structure]

[chemical structure]

[chemical structure]

[chemical structure]

[chemical structure]

[chemical structure]

rAPOBEC1-(GGS)₃-dCas9 primary sequence
(SEQ ID NO: 150)
MSSETGPVAVDPTLRRRIEPHEFEVFFDPRELRKETCLLYEINWGGRHSIWRHTSQNTN
KHVEVNFIEKFTTERYFCPNTRCSITWFLSWSPCGECSRAITEFLSRYPHVTLFIYIARL
YHHADPRNRQGLRDLISSGVTIQIMTEQESGYCWRNFVNYSPSNEAHWPRYPHLWVR

[chemical structure]

[chemical structure]

[chemical structure]

[chemical structure]

[chemical structure]

[chemical structure]

[chemical structure]

[chemical structure]

[chemical structure]

[chemical structure]

[chemical structure]

[chemical structure]

[chemical structure]

[chemical structure]

[chemical structure]

[chemical structure]

[chemical structure]

[chemical structure]

[chemical structure]

[chemical structure]

[chemical structure]

[chemical structure]

[chemical structure]

[chemical structure]

[chemical structure]

[chemical structure]

(SEQ ID NO: 151)

[chemical structure]

[chemical structure]

[chemical structure]

[chemical structure]

[chemical structure]

[chemical structure]

[chemical structure]

[chemical structure]

[chemical structure]

[chemical structure]

[chemical structure]

[chemical structure]

[chemical structure]

[chemical structure]

[chemical structure]

[chemical structure]

[chemical structure]

[chemical structure]

[chemical structure]

[chemical structure]

[chemical structure]

[chemical structure]

[chemical structure]

[chemical structure]

FDPRELRKETCLLYEINWGGRHSIWRHTSQNTNKHVEVNFIEKFTTERYFCPNTRCSIT
WFLSWSPCGECSRAITEFLSRYPHVTLFIYIARLYHHADPRNRQGLRDLISSGVTIQIMT
EQESGYCWRNFVNYSPSNEAHWPRYPHLWVRLYVLELYCIILGLPPCLNILRRKQPQL
TFFTIALQSCHYQRLPPHILWATGLK

[chemical structure]

(SEQ ID NO: 152)

[chemical structure]

[chemical structure]

[chemical structure]

[chemical structure]

[chemical structure]

[chemical structure]

[chemical structure]

[chemical structure]

[chemical structure]

[chemical structure]

[chemical structure]

[chemical structure]

[chemical structure]

[chemical structure]

[chemical structure]

[chemical structure]

[chemical structure]

[chemical structure]

[chemical structure]

[chemical structure]

[chemical structure]

[chemical structure]

[chemical structure]

[chemical structure]

HEFEVFFDPRELRKETCLLYEINWGGRHSIWRHTSQNTNKHVEVNFIEKFTTERYFCP
NTRCSITWFLSWSPCGECSRAITEFLSRYPHVTLFIYIARLYHHADPRNRQGLRDLISSG
VTIQIMTEQESGYCWRNFVNYSPSNEAHWPRYPHLWVRLYVLELYCIILGLPPCLNIL
RRKQPQLTFFTIALQSCHYQRLPPHILWATGLK

[chemical structure]

(SEQ ID NO: 153)
MSSETGPVAVDPTLRRRIEPHEFEVFFDPRELRKETCLLYEINWGGRHSIWRHTSQNTN
KHVEVNFIEKFTTERYFCPNTRCSITWFLSWSPCGECSRAITEFLSRYPHVTLFIYIARL
YHHADPRNRQGLRDLISSGVTIQIMTEQESGYCWRNFVNYSPSNEAHWPRYPHLWVR

[chemical structure]

[chemical structure]

[chemical structure]

[chemical structure]

[chemical structure]

[chemical structure]

[chemical structure]

[chemical structure]

[chemical structure]

[chemical structure]

[chemical structure]

[chemical structure]

[chemical structure]

[chemical structure]

[chemical structure]

[chemical structure]

[chemical structure]

[chemical structure]

[chemical structure]

[chemical structure]

[chemical structure]

[chemical structure]

[chemical structure]

[chemical structure]

[chemical structure]

[0429] FIG. 2 shows that the N-terminal deaminase fusions showed significant activity on the single stranded DNA substrates. For this reason, only the N-terminal architecture was chosen for further experiments.

[0430] FIG. 3 illustrates double stranded DNA substrate binding by deaminase-dCas9:sgRNA complexes. A number of double stranded deaminase substrate sequences were generated. The sequences are provided below. The structures according to FIG. 3 are identified in these sequences (36 bp: underlined, sgRNA target sequence: bold; PAM: boxed; 21 bp: italicized). All substrates were labeled with a 5′-Cy3 label:

(SEQ ID NO: 85)
2: GTAGGTAGTTAGGATGAATGGAAGGTTGGTATAGTCCCGCGGATTTATTTATTTA

[chemical structure]

(SEQ ID NO: 86)
3: GTAGGTAGTTAGGATGAATGGAAGGTTGGTATAGCTTCCGCGGATTTATTTATTT

[chemical structure]

(SEQ ID NO: 87)
4: GTAGGTAGTTAGGATGAATGGAAGGTTGGTATAGCCTTCCGCGGATTTATTTATT

[chemical structure]

(SEQ ID NO: 88)
5: GTAGGTAGTTAGGATGAATGGAAGGTTGGTATAGCCATTCCGCGGATTTATTTAT

[chemical structure]

(SEQ ID NO: 89)
6: GTAGGTAGTTAGGATGAATGGAAGGTTGGTATAGCCTATTCCGCGGATTTATTTA

[chemical structure]

(SEQ ID NO: 90)
7: GTAGGTAGTTAGGATGAATGGAAGGTTGGTATAGCCTTATTCCGCGGATTTATTT

[chemical structure]

(SEQ ID NO: 91)
8: GTAGGTAGTTAGGATGAATGGAAGGTTGGTATAGCCATTATTCCGCGGATTTATT

[chemical structure]

(SEQ ID NO: 92)
9: GTAGGTAGTTAGGATGAATGGAAGGTTGGTATAGCCTATTATTCCGCGGATTTAT

[chemical structure]

(SEQ ID NO: 93)
10: GTAGGTAGTTAGGATGAATGGAAGGTTGGTATAGCCATTATATTCCGCGGATTT

[chemical structure]

(SEQ ID NO: 94)
11: GTAGGTAGTTAGGATGAATGGAAGGTTGGTATAGCCTATTATATTCCGCGGATT

[chemical structure]

(SEQ ID NO: 95)
12: GTAGGTAGTTAGGATGAATGGAAGGTTGGTATAGCCTTATTATATTCCGCGGAT

[chemical structure]

(SEQ ID NO: 96)
13: GTAGGTAGTTAGGATGAATGGAAGGTTGGTATAGCCATTATTATATTCCGCGGA

[chemical structure]

(SEQ ID NO: 97)
14: GTAGGTAGTTAGGATGAATGGAAGGTTGGTATAGCCTATTATTATATTCCGCGG

[chemical structure]

(SEQ ID NO: 98)
15: GTAGGTAGTTAGGATGAATGGAAGGTTGGTATAGCCATTATTATTATTACCGCG

[chemical structure]

(SEQ ID NO: 99)
18: GTAGGTAGTTAGGATGAATGGAAGGTTGGTATAGCCATTATTATTATTATTACCG

[chemical structure]

“-“:
(SEQ ID NO: 100)

[chemical structure]

[chemical structure]

(SEQ ID NO: 101)
8U: GTAGGTAGTTAGGATGAATGGAAGGTTGGTGTAGATTATTATCUGCGGATTTAT

[chemical structure]

*In all substrates except for “8U”, the top strand in FIG. 3
is the complement of the sequence specified here. In the case
of “8U”, there is a “G” opposite the U.

[0431] FIG. 4 shows the results of a double stranded DNA Deamination Assay. The fusions were expressed and purified with an N-terminal His6 tag via both Ni-NTA and sepharose chromatography. In order to assess deamination on dsDNA substrates, the various dsDNA substrates shown on the previous slide were incubated at a 1:8 dsDNA:fusion protein ratio and incubated at 37° C. for 2 hours. Once the dCas9 portion of the fusion binds to the DNA it blocks access of the USER enzyme to the DNA. Therefore, the fusion proteins were denatured following the incubation and the dsDNA was purified on a spin column, followed by incubation for 45 min with the USER Enzyme and resolution of the resulting DNA substrate and substrate fragments on a 10% TBE-urea gel.

[0432] FIG. 5 demonstrates that Cas9 fusions can target positions 3-11 of double-stranded DNA target sequences (numbered according to the schematic in FIG. 3). Upper Gel: 1 μM rAPOBEC1-GGS-dCas9, 125 nM dsDNA, 1 eq sgRNA. Mid Gel: 1 μM rAPOBEC1-(GGS)₃-dCas9, 125 nM dsDNA, 1 eq sgRNA. Lower Gel: 1.85 μM rAPOBEC1-XTEN-dCas9, 125 nM dsDNA, 1 eq sgRNA. Based on the data from these gels, positions 3-11 (according to the numbering in FIG. 3) are sufficiently exposed to the activity of the deaminase to be targeted by the fusion proteins tested. Access of the deaminase to other positions is most likely blocked by the dCas9 protein.

[0433] The data further indicates that a linker of only 3 amino acids (GGS) is not optimal for allowing the deaminase to access the single stranded portion of the DNA. The 9 amino acid linker [(GGS)₃] (SEQ ID NO: 610) and the more structured 16 amino acid linker (XTEN) allow for more efficient deamination.

[0434] FIG. 6 demonstrates that the correct guide RNA, e.g., the correct sgRNA, is required for deaminase activity. The gel shows that fusing the deaminase to dCas9, the deaminase enzyme becomes sequence specific (e.g., using the fusion with an eGFP sgRNA results in no deamination), and also confers the capacity to the deaminase to deaminate dsDNA. The native substrate of the deaminase enzyme is ssDNA, and no deamination occurred when no sgRNA was added. This is consistent with reported knowledge that APOBEC deaminase by itself does not deaminate dsDNA. The data indicates that Cas9 opens the double-stranded DNA helix within a short window, exposing single-stranded DNA that is then accessible to the APOBEC deaminase for cytidine deamination. The sgRNA sequences used are provided below. sequences (36 bp: underlined, sgRNA target sequence: bold; PAM: boxed; 21 bp: italicized)

DNA sequence 8:

5′-Cy3-
(SEQ ID NO: 102)
GTAGGTAGTTAGGATGAATGGAAGGTTGGTATAGCCATTATTCCGCGGAT

[chemical structure]

Correct spRNA sentience (partial 3′ sentience):

(SEQ ID NO: 103)

5′-AUUAUUCCGCGGAUUUAUUUGUUUUAGAGCUAG . . . -3′

[0435] eGFP sgRNA sequence (partial 3′-sequence):

(SEQ ID NO: 104)

5′-CGUAGGCCAGGGUGGUCACGGUUUUAGAGCUAG . . . -3′

### Example 2: Deamination of DNA Target Sequence

[0436] Exemplary Deamination Targets.

[0437] The dCas9:deaminase fusion proteins described herein can be delivered to a cell in vitro or ex vivo or to a subject in vivo and can be used to effect C to T or G to A transitions when the target nucleotide is in positions 3-11 with respect to a PAM. Exemplary deamination targets include, without limitation, the following: CCR5 truncations: any of the codons encoding Q93, Q102, Q186, R225, W86, or Q261 of CCR5 can be deaminated to generate a STOP codon, which results in a nonfunctional truncation of CCR5 with applications in HIV treatment. APOE4 mutations: mutant codons encoding C11R and C57R mutant APOE4 proteins can be deaminated to revert to the wild-type amino acid with applications in Alzheimer's treatment. eGFP truncations: any of the codons encoding Q158, Q184, Q185 can be deaminated to generate a STOP codon, or the codon encoding M1 can be deaminated to encode I, all of which result in loss of eGFP fluorescence, with applications in reporter systems. eGFP restoration: a mutant codon encoding T65A or Y66C mutant GFP, which does not exhibit substantial fluorescence, can be deaminated to restore the wild-type amino acid and confer fluorescence. PIK3CA mutation: a mutant codon encoding K111E mutant PIK3CA can be deaminated to restore the wild-type amino acid residue with applications in cancer. CTNNB1 mutation: a mutant codon encoding T41A mutant CTNNB1 can be deaminated to restore the wild-type amino acid residue with applications in cancer. HRAS mutation: a mutant codon encoding Q61R mutant HRAS can be deaminated to restore the wild-type amino acid residue with applications in cancer. P53 mutations: any of the mutant codons encoding Y163C, Y236C, or N239D mutant p53 can be deaminated to encode the wild type amino acid sequence with applications in cancer.

The feasibility of deaminating these target sequences in double-stranded DNA is demonstrated in FIGS. 7 and 8. FIG. 7 illustrates the mechanism of target DNA binding of in vivo target sequences by deaminase-dCas9:sgRNA complexes.

[0438] FIG. 8 shows successful deamination of exemplary disease-associated target sequences. Upper Gel: CCR5 Q93: coding strand target in pos. 10 (potential off-targets at positions 2, 5, 6, 8, 9); CCR5 Q102: coding strand target in pos. 9 (potential off-targets at positions 1, 12, 14); CCR5 Q186: coding strand target in pos. 9 (potential off-targets at positions 1, 5, 15); CCR5 R225: coding strand target in pos. 6 (no potential off-targets); eGFP Q158: coding strand target in pos. 5 (potential off-targets at positions 1, 13, 16); eGFP Q184/185: coding strand target in pos. 4 and 7 (potential off-targets at positions 3, 12, 14, 15, 16, 17, 18); eGFP M1: template strand target in pos. 12 (potential off-targets at positions 2, 3, 7, 9, 11) (targets positions 7 and 9 to small degree); eGFP T65A: template strand target in pos. 7 (potential off-targets at positions 1, 8, 17); PIK3CA K111E: template strand target in pos. 2 (potential off-targets at positions 5, 8, 10, 16, 17); PIK3CA K111E: template strand target in pos. 13 (potential off-targets at positions 11, 16, 19) X. Lower Gel: CCR5 W86: template strand target in pos. 2 and 3 (potential off-targets at positions 1, 13) X; APOE4 C11R: coding strand target in pos. 11 (potential off-targets at positions 7, 13, 16, 17); APOE4 C57R: coding strand target in pos. 5) (potential off-targets at positions 7, 8, 12); eGFP Y66C: template strand target in pos. 11 (potential off-targets at positions 1, 4, 6, 8, 9, 16); eGFP Y66C: template strand target in pos. 3 (potential off-targets at positions 1, 8, 17); CCR5 Q261: coding strand target in pos. 10 (potential off-targets at positions 3, 5, 6, 9, 18); CTNNB1 T41A: template strand target in pos. 7 (potential off-targets at positions 1, 13, 15, 16) X; HRAS Q61R: template strand target in pos. 6 (potential off-targets at positions 1, 2, 4, 5, 9, 10, 13); p53 Y163C: template strand target in pos. 6 (potential off-targets at positions 2, 13, 14); p53 Y236C: template strand target in pos. 8 (potential off-targets at positions 2, 4); p53 N239D: template strand target in pos. 4 (potential off-targets at positions 6, 8). Exemplary DNA sequences of disease targets are provided below (PAMs (5′-NGG-3′) and target positions are boxed):

CCR5 Q93: 5′-Cy3-
(SEQ ID NO: 105)
GTAGGTAGTTAGGATGAATGGAAGGTTGGTAACTATGCTGCCGCC

[chemical structure]

(SEQ ID NO: 106)
CCR5 Q102: 5′-Cy3-
GTAGGTAGTTAGGATGAATGGAAGGTTGGTAAAATACAATGTGT

[chemical structure]

CCR5 Q186: 5′-Cy3-
(SEQ ID NO: 107)
GTAGGTAGTTAGGATGAATGGAAGGTTGGTATTTTCCATACAGT

[chemical structure]

CCR5 R225: 5′-Cy3-
(SEQ ID NO: 108)

[chemical structure]

[chemical structure]

CCR5 W86: 5′-Cy3-
(SEQ ID NO: 109)

[chemical structure]

[chemical structure]

CCR5 Q261: 5′-Cy3-
(SEQ ID NO: 110)
GTAGGTAGTTAGGATGAATGGAAGGTTGGTATCCTGAACACCTT

[chemical structure]

APOE4 C11R: 5′-Cy3-
(SEQ ID NO: 111)
GTAGGTAGTTAGGATGAATGGAAGGTTGGTAGACATGGAGGAC

[chemical structure]

APOE4 C57R: 5′-Cy3-
(SEQ ID NO: 112)

[chemical structure]

[chemical structure]

eGFP Q158: 5′-Cy3-
(SEQ ID NO: 113)

[chemical structure]

[chemical structure]

(SEQ ID NO: 114)

[chemical structure]

[chemical structure]

eGFP M1: 5′-Cy3-
(SEQ ID NO: 115)
GTAGGTAGTTAGGATGAATGGAAGGTTGGTACCTCGCCCTTGCTCA

[chemical structure]

eGFP T65A: 5′-Cy3-
(SEQ ID NO: 116)

[chemical structure]

[chemical structure]

eGFP Y66C: 5′-Cy3-
(SEQ ID NO: 117)
GTAGGTAGTTAGGATGAATGGAAGGTTGGTAAAGCACTGCACTC

[chemical structure]

eGFP Y66C: 5′-Cy3-
(SEQ ID NO: 118)

[chemical structure]

[chemical structure]

(SEQ ID NO: 119)

[chemical structure]

[chemical structure]

(SEQ ID NO: 120)
PIK3CA K111E: 5′-Cy3-GTAGGTAGTTAGGATGAATGGAAGGTTGGTATTCTCGATTG

[chemical structure]

CTNNB1 T41A: 5′-Cy3-
(SEQ ID NO: 121)
GTAGGTAGTTAGGATGAATGGAAGGTTGGTAAGGAGCTGTGG

[chemical structure]

HRAS Q61R: 5′-Cy3-
(SEQ ID NO: 122)

[chemical structure]

[chemical structure]

p53 Y163C: 5′-Cy3-
(SEQ ID NO: 123)

[chemical structure]

[chemical structure]

p53 Y236C: 5′-Cy3-
(SEQ ID NO: 124)

[chemical structure]

[chemical structure]

p53 N239D: 5′-Cy3-
(SEQ ID NO: 125)

[chemical structure]

[chemical structure]

### Example 3: Uracil Glycosylase Inhibitor Fusion Improves Deamination Efficiency

[0439] Direct programmable nucleobase editing efficiencies in mammalian cells by dCas9:deaminase fusion proteins can be improved significantly by fusing a uracil glycosylase inhibitor (UGI) to the dCas9:deaminase fusion protein.

[0440] FIG. 9 shows in vitro C→T editing efficiencies in human HEK293 cells using rAPOBEC1-XTEN-dCas9:

[chemical structure]

(SEQ ID NO: 126)
MSSETGPVAVDPTLRRRIEPHEFEVFFDPRELRKETCLLYEINWGGRHSIWRHTSQNTN
KHVEVNFIEKFTTERYFCPNTRCSITWFLSWSPCGECSRAITEFLSRYPHVTLFIYIARLY
HHADPRNRQGLRDLISSGVTIQIMTEQESGYCWRNFVNYSPSNEAHWPRYPHLWVRL
YVLELYCIILGLPPCLNILRRKQPQLTFFTIALQSCHYQRLPPHILWATGLKSGSETPGTS

[chemical structure]

[chemical structure]

[chemical structure]

[chemical structure]

[chemical structure]

[chemical structure]

[chemical structure]

[chemical structure]

[chemical structure]

[chemical structure]

[chemical structure]

[chemical structure]

[chemical structure]

[chemical structure]

[chemical structure]

[chemical structure]

[chemical structure]

[chemical structure]

[chemical structure]

[chemical structure]

[chemical structure]

[chemical structure]

[chemical structure]

[chemical structure]

Protospacer sequences were as follows:

(SEQ ID NO: 127)

| | |
|---|---|
| EMX1: | [chemical structure] |
| | (SEQ ID NO: 128) |
| FANCF: | [chemical structure] |
| | (SEQ ID NO: 129) |
| HEK293 site 2: | [chemical structure] |
| | (SEQ ID NO: 130) |
| HEK293 site 3: | [chemical structure] |
| | (SEQ ID NO: 735) |
| HEK293 site 4: | [chemical structure] |
| | (SEQ ID NO: 132) |
| RNF2: | [chemical structure] |

*PAMs are boxed, C residues within target window
(positions 3-11) are numbered and bolded.

[0441] FIG. 10 demonstrates that C→T editing efficiencies on the same protospacer sequences in HEK293T cells are greatly enhanced when a UGI domain is fused to the rAPOBEC1:dCas9 fusion protein.

[chemical structure]

(SEQ ID NO: 133)
MSSETGPVAVDPTLRRRIEPHEFEVFFDPRELRKETCLLYEINWGGRHSIWRHTSQNTN
KHVEVNFIEKFTTERYFCPNTRCSITWFLSWSPCGECSRAITEFLSRYPHVTLFIYIARLY
HHADPRNRQGLRDLISSGVTIQIMTEQESGYCWRNFVNYSPSNEAHWPRYPHLWVRL
YVLELYCIILGLPPCLNILRRKQPQLTFFTIALQSCHYQRLPPHILWATGLKSGSETPGTS

[chemical structure]

[chemical structure]

[chemical structure]

[chemical structure]

[chemical structure]

[chemical structure]

[chemical structure]

[chemical structure]

[chemical structure]

[chemical structure]

[chemical structure]

[chemical structure]

[chemical structure]

[chemical structure]

[chemical structure]

[chemical structure]

[chemical structure]

[chemical structure]

[chemical structure]

[chemical structure]

[chemical structure]

[chemical structure]

[chemical structure]

[chemical structure]

LMLPEEVEEVIGNKPESDILVHTAYDESTDENVMLLTSDAPEYKPWALVICIDSNGE
NKIKMLSGGSPKKKRKV

[0442] The percentages in FIGS. 9 and 10 are shown from sequencing both strands of the target sequence. Because only one of the strands is a substrate for deamination, the maximum possible deamination value in this assay is 50%. Accordingly, the deamination efficiency is double the percentages shown in the tables. E.g., a value of 50% relates to deamination of 100% of double-stranded target sequences.

When a uracil glycosylase inhibitor (UGI) was fused to the dCas9:deaminase fusion protein (e.g., rAPOBEC1-XTEN-dCas9-[UGI]-NLS), a significant increase in editing efficiency in cells was observed. This result indicates that in mammalian cells, the DNA repair machinery that cuts out the uracil base in a U:G base pair is a rate-limiting process in DNA editing. Tethering UGI to the dVas9:deaminase fusion proteins greatly increases editing yields.

[0443] Without UGI, typical editing efficiencies in human cells were in the ˜2-14% yield range (FIG. 9 and FIG. 10, “XTEN” entries). With UGI (FIG. 10, “UGI” entries) the editing was observed in the ˜6-40% range. Using a UGI fusion is thus more efficient than the current alternative method of correcting point mutations via HDR, which also creates an excess of indels in addition to correcting the point mutation. No indels resulting from treatment with the cas9:deaminase:UGI fusions were observed.

### Example 4: Direct, Programmable Conversion of a Target Nucleotide in Genomic DNA without Double-Stranded DNA Cleavage

[0444] Current genome-editing technologies introduce double-stranded DNA breaks at a target locus of interest as the first step to gene correction.^{39,40} Although most genetic diseases arise from mutation of a single nucleobase to a different nucleobase, current approaches to revert such changes are very inefficient and typically induce an abundance of random insertions and deletions (indels) at the target locus as a consequence of the cellular response to double-stranded DNA breaks.^{39,40} Reported herein is the development of nucleobase editing, a new strategy for genome editing that enables the direct conversion of one target nucleobase into another in a programmable manner, without requiring double-stranded DNA backbone cleavage. Fusions of CRISPR/Cas9 were engineered and the cytidine deaminase enzyme APOBEC1 that retain the ability to be programmed with a guide RNA, do not induce double-stranded DNA breaks, and mediate the direct conversion of cytidine to uracil, thereby effecting a C→T (or G→A) substitution following DNA replication, DNA repair, or transcription if the template strand is targeted. The resulting “nucleobase editors” convert cytidines within a window of approximately five nucleotides, and can efficiently correct a variety of point mutations relevant to human disease in vitro. In four transformed human and murine cell lines, second- and third-generation nucleobase editors that fuse uracil glycosylase inhibitor (UGI), and that use a Cas9 nickase targeting the non-edited strand, respectively, can overcome the cellular DNA repair response to nucleobase editing, resulting in permanent correction of up to 37% or (˜15-75%) of total cellular DNA in human cells with minimal (typically ≤1%) indel formation. In contrast, canonical Cas9-mediated HDR on the same targets yielded an average of 0.7% correction with 4% indel formation. Nucleobase editors were used to revert two oncogenic p53 mutations into wild-type alleles in human breast cancer and lymphoma cells, and to convert an Alzheimer's Disease associated Arg codon in ApoE4 into a non-disease-associated Cys codon in mouse astrocytes. Base editing expands the scope and efficiency of genome editing of point mutations.

[0445] The clustered regularly interspaced short palindromic repeat (CRISPR) system is a prokaryotic adaptive immune system that has been adapted to mediate genome engineering in a variety of organisms and cell lines.⁴¹ CRISPR/Cas9 protein-RNA complexes localize to a target DNA sequence through base pairing with a guide RNA, and natively create a DNA double-stranded break (DSB) at the locus specified by the guide RNA. In response to DSBs, endogenous DNA repair processes mostly result in random insertions or deletions (indels) at the site of DNA cleavage through non-homologous end joining (NHEJ). In the presence of a homologous DNA template, the DNA surrounding the cleavage site can be replaced through homology-directed repair (HDR). When simple disruption of a disease-associated gene is sufficient (for example, to treat some gain-of-function diseases), targeted DNA cleavage followed by indel formation can be effective. For most known genetic diseases, however, correction of a point mutation in the target locus, rather than stochastic disruption of the gene, is needed to address or study the underlying cause of the disease.⁶⁸

[0446] Motivated by this need, researchers have invested intense effort to increase the efficiency of HDR and suppress NHEJ. For example, a small-molecule inhibitor of ligase IV, an essential enzyme in the NHEJ pathway, has been shown to increase HDR efficiency.^{42,43} However, this strategy is challenging in post-mitotic cells, which typically down-regulate HDR, and its therapeutic relevance is limited by the potential risks of inhibiting ligase IV in non-target cells. Enhanced HDR efficiency can also be achieved by the timed delivery of Cas9-guide RNA complexes into chemically synchronized cells, as HDR efficiency is highly cell-cycle dependent.⁴⁴ Such an approach, however, is limited to research applications in cell culture since synchronizing cells is highly disruptive. Despite these developments, current strategies to replace point mutations using HDR in most contexts are very inefficient (typically ˜0.1 to 5%),^{42,43,45,46, 75} especially in unmodified, non-dividing cells. In addition, HDR competes with NHEJ during the resolution of double-stranded breaks, and indels are generally more abundant outcomes than gene replacement. These observations highlight the need to develop alternative approaches to install specific modifications in genomic DNA that do not rely on creating double-stranded DNA breaks. A small-molecule inhibitor of ligase IV, an essential enzyme in the NHEJ pathway, has been shown to increase HDR efficiency.^{42,43} However, this strategy is challenging in post-mitotic cells, which typically down-regulate HDR, and its therapeutic relevance is limited by the potential risks of inhibiting ligase IV in non-target cells. Enhanced HDR efficiency can also be achieved by the timed delivery of Cas9-guide RNA complexes into chemically synchronized cells, as HDR efficiency is highly cell-cycle dependent.⁴⁴ Such an approach, however, is limited to research applications in cell culture since synchronizing cells is highly disruptive. In some cases, it is possible to design HDR templates such that the product of successful HDR contains mutations in the PAM sequence and therefore is no longer a substrate for subsequent Cas9 modification, increasing the overall yield of HDR products,⁷⁵ although such an approach imposes constraints on the product sequences. Recently, this strategy has been coupled to the use of ssDNA donors that are complementary to the non-target strand and high-efficiency ribonucleoprotein (RNP) delivery to substantially increase the efficiency of HDR, but even in these cases the ratio of HDR to NHEJ outcomes is relatively low (<2).⁸³

[0447] It was envisioned that direct catalysis of the conversion of one nucleobase to another at a programmable target locus without requiring DNA backbone cleavage could increase the efficiency of gene correction relative to HDR without introducing undesired random indels at the locus of interest. Catalytically dead Cas9 (dCas9), which contains Asp10Ala and His840Ala mutations that inactivate its nuclease activity, retains its ability to bind DNA in a guide RNA-programmed manner but does not cleave the DNA backbone.^{16,47} In principle, conjugation of dCas9 with an enzymatic or chemical catalyst that mediates the direct conversion of one nucleobase to another could enable RNA-programmed nucleobase editing. The deamination of cytosine (C) is catalyzed by cytidine deaminases²⁹ and results in uracil (U), which has the base pairing properties of thymine (T). dCas9 was fused to cytidine deaminase enzymes in order to test their ability to convert C to U at a guide RNA-specified DNA locus. Most known cytidine deaminases operate on RNA, and the few examples that are known to accept DNA require single-stranded DNA.⁴⁸ Recent studies on the dCas9-target DNA complex reveal that at least nine nucleotides of the displaced DNA strand are unpaired upon formation of the Cas9:guide RNA:DNA “R-loop” complex.¹² Indeed, in the structure of the Cas9 R-loop complex the first 11 nucleotides of the protospacer on the displaced DNA strand are disordered, suggesting that their movement is not highly restricted.⁷⁶ It has also been speculated that Cas9 nickase-induced mutations at cytosines in the non-template strand might arise from their accessibility by cellular cytidine deaminase enzymes.⁷⁷ Recent studies on the dCas9-target DNA complex have revealed that at least 26 bases on the non-template strand are unpaired when Cas9 binds to its target DNA sequence.⁴⁹ It was reasoned that a subset of this stretch of single-stranded DNA in the R-loop might serve as a substrate for a dCas9-tethered cytidine deaminase to effect direct, programmable conversion of C to U in DNA (FIG. 11A).

[0448] Four different cytidine deaminase enzymes (hAID, hAPOBEC3G, rAPOBEC1, and pmCDA1) were expressed in a mammalian cell lysate-derived in vitro transcription-translation system and evaluated for ssDNA deamination. Of the four enzymes, rAPOBEC1 showed the highest deaminase activity under the tested conditions and was chosen for dCas9 fusion experiments (FIG. 36A). Although appending rAPOBEC1 to the C-terminus of dCas9 abolishes deaminase activity, fusion to the N-terminus of dCas9 preserves deaminase activity on ssDNA at a level comparable to that of the unfused enzyme. Four rAPOBEC1-dCas9 fusions were expressed and purified with linkers of different length and composition (FIG. 36B), and evaluated each fusion for single guide RNA (sgRNA)-programmed dsDNA deamination in vitro (FIGS. 11A to 11C and FIGS. 15A to 15D).

[0449] Efficient, sequence-specific, sgRNA-dependent C to U conversion was observed in vitro (FIGS. 11A to 11C). Conversion efficiency was greatest using rAPOBEC1-dCas9 linkers over nine amino acids in length. The number of positions susceptible to deamination (the deamination “activity window”) increases with linker length was extended from three to 21 amino acids (FIGS. 36C to 36F15A to 15D). The 16-residue XTEN linker⁵⁰ was found to offer a promising balance between these two characteristics, with an efficient deamination window of approximately five nucleotides, from positions 4 to 8 within the protospacer, counting the end distal to the protospacer-adjacent motif (PAM) as position 1. The rAPOBEC1-XTEN-dCas9 protein served as the first-generation nucleobase editor (NBE1).

[0450] Elected were seven mutations relevant to human disease that in theory could be corrected by C to T nucleobase editing, synthesized double-stranded DNA 80-mers of the corresponding sequences, and assessed the ability of NBE1 to correct these mutations in vitro (FIGS. 16A to 16B). NBE1 yielded products consistent with efficient editing of the target C, or of at least one C within the activity window when multiple Cs were present, in six of these seven targets in vitro, with an average apparent editing efficiency of 44% (FIGS. 16A to 16B). In the three cases in which multiple Cs were present within the deamination window, evidence of deamination of some or all of these cytosines was observed. In only one of the seven cases tested were substantial yields of edited product observed (FIGS. 16A to 16B). Although the preferred sequence context for APOBEC1 substrates is reported to be CC or TC,⁵¹ it was anticipated that the increased effective molarity of the deaminase and its single-stranded DNA substrate mediated by dCas9 binding to the target locus may relax this restriction. To illuminate the sequence context generality of NBE1, its ability to edit a 60-mer double-stranded DNA oligonucleotide containing a single fixed C at position 7 within the protospacer was assayed, as well as all 36 singly mutated variants in which protospacer bases 1-6 and 8-13 were individually varied to each of the other three bases. Each of these 37 sequences were treated with 1.9 μM NBE1, 1.9 μM of the corresponding sgRNA, and 125 nM DNA for 2 h, similar to standard conditions for in vitro Cas9 assays⁵². High-throughput DNA sequencing (HTS) revealed 50 to 80% C to U conversion of targeted strands (25 to 40% of total sequence reads arising from both DNA strands, one of which is not a substrate for NBE1) (FIG. 12A). The nucleotides surrounding the target C had little effect on editing efficiency was independent of sequence context unless the base immediately 5′ of the target C is a G, in which case editing efficiency was substantially lower (FIGS. 12A to 12B). NBE1 activity in vitro was assessed on all four NC motifs at positions 1 through 8 within the protospacer (FIGS. 12A to 12B). In general, NBE1 activity on substrates was observed to follow the order TC≥CC≥AC≥GC, with maximum editing efficiency achieved when the target C is at or near position 7. In addition, it was observed that the nucleobase editor is highly processive, and will efficiently convert most of all Cs to Us on the same DNA strand within the 5-base activity window (FIG. 17).

[0451] While BE1 efficiently processes substrates in a test tube, in cells a tree of possible DNA repair outcomes determines the fate of the initial U:G product of base editing (FIG. 29A). To test the effectiveness of nucleobase editing in human cells, NBE1 codon usage was optimized for mammalian expression, appended a C-terminal nuclear localization sequence (NLS),⁵³ and assayed its ability to convert C to T in human cells on 14Cs in six well-studied target sites throughout the human genome (FIG. 37A).⁵⁴ The editable Cs were confirmed within each protospacer in vitro by incubating NBE1 with synthetic 80-mers that correspond to the six different genomic sites, followed by HTS (FIGS. 13A to 13C, FIG. 29B and FIG. 25). Next, HEK293T cells were transfected with plasmids encoding NBE1 and one of the six target sgRNAs, allowed three days for nucleobase editing to occur, extracted genomic DNA from the cells, and analyzed the loci by HTS. Although C to T editing in cells at the target locus was observed for all six cases, the efficiency of nucleobase editing was 1.1% to 6.3% or 0.8%-7.7% of total DNA sequences (corresponding to 2.2% to 12.6% of targeted strands), a 6.3-fold to 37-fold or 5-fold to 36-fold decrease in efficiency compared to that of in vitro nucleobase editing (FIGS. 13A to 13C, FIG. 29B and FIG. 25). It was observed that some base editing outside of the typical window of positions 4 to 8 when the substrate C is preceded by a T, which we attribute to the unusually high activity of APOBEC1 for TC substrates.⁴⁸

[0452] It was asked whether the cellular DNA repair response to the presence of U:G heteroduplex DNA was responsible for the large decrease in nucleobase editing efficiency in cells (FIG. 29A). Uracil DNA glycosylase (UDG) catalyzes removal of U from DNA in cells and initiates base excision repair (BER), with reversion of the U:G pair to a C:G pair as the most common outcome (FIG. 29A).⁵⁵ Uracil DNA glycosylase inhibitor (UGI), an 83-residue protein from B. subtilis bacteriophage PBS1, potently blocks human UDG activity (IC₅₀=12 pM).⁵⁶ UGI was fused to the C-terminus of NBE1 to create the second-generation nucleobase editor NBE2 and repeated editing assays on all six genomic loci. Editing efficiencies in human cells were on average 3-fold higher with NBE2 than with NBE1, resulting in gene conversion efficiencies of up to 22.8% of total DNA sequenced (up to 45.6% of targeted strands) (FIGS. 13A to 13C and FIG. 29B). To test base editing in human cells, BE1 codon usage was optimized for mammalian expression and appended a C-terminal nuclear localization sequence (NLS).⁵³

[0453] Similar editing efficiencies were observed when a separate plasmid overexpressing UGI was co-transfected with NBE1 (FIGS. 18A to 18H). However, while the direct fusion of UGI to NBE1 resulted in no significant increase in C to T mutations at monitored non-targeted genomic locations, overexpression of unfused UGI detectably increased the frequency of C to T mutations elsewhere in the genome (FIGS. 18A to 18H). The generality of NBE2-mediated nucleobase editing was confirmed by assessing editing efficiencies on the same six genomic targets in U2OS cells, and observed similar results with those in HEK293T cells (FIG. 19). Importantly, NBE2 typically did not result in any detectable indels (FIG. 13C and FIG. 29C), consistent with the known mechanistic dependence of NHEJ on double-stranded DNA breaks.^{57,78} Together, these results indicate that conjugating UGI to NBE1 can greatly increase the efficiency of nucleobase editing in human cells.

[0454] The permanence of nucleobase editing in human cells was confirmed by monitoring editing efficiencies over multiple cell divisions in HEK293T cells at two of the tested genomic loci. Genomic DNA was harvested at two time points: three days after transfection with plasmids expressing NBE2 and appropriate sgRNAs, and after passaging the cells and growing them for four additional days (approximately five subsequent cell divisions). No significant change in editing efficiency was observed between the non-passaged cells (editing observed in 4.6% to 6.6% of targeted strands for three different target Cs) and passaged cells (editing observed in 4.6% to 6.4% of targeted strands for the same three target Cs), confirming that the nucleobase edits became permanent following cell division (FIG. 20). Indels will on rare occasion arise from the processing of U:G lesions by cellular repair processes, which involve single-strand break intermediates that are known to lead to indels.⁸⁴ Given that several hundred endogenous U:G lesions are generated every day per human cell from spontaneous cytidine deaminase,⁸⁵ it was anticipate that the total indel frequency from U:G lesion repair is unlikely to increase from BE1 or BE2 activity at a single target locus.

[0455] To further increase the efficiency of nucleobase editing in cells, it was anticipated that nicking the non-edited strand may result in a smaller fraction of edited Us being removed by the cell, since eukaryotic mismatch repair machinery uses strand discontinuity to direct DNA repair to any broken strand of a mismatched duplex (FIG. 29A).^{58,79,80} The catalytic His residue was restored at position 840 in the Cas9 HNH domain,^{47,59} resulting in the third-generation nucleobase editor NBE3 that nicks the non-edited strand containing a G opposite the targeted C, but does not cleave the target strand containing the C. Because NBE3 still contains the Asp10Ala mutation in Cas9, it does not induce double-stranded DNA cleavage. This strategy of nicking the non-edited strand augmented nucleobase editing efficiency in human cells by an additional 1.4- to 4.8-fold relative to NBE2, resulting in up to 36.3% of total DNA sequences containing the targeted C to T conversion on the same six human genomic targets in HEK293T cells (FIGS. 13A to 13C and FIG. 29B). Importantly, only a small frequency of indels, averaging 0.8% (ranging from 0.2% to 1.6% for the six different loci), was observed from NBE3 treatment (FIG. 13C, FIG. 29C, and FIG. 34). In contrast, when cells were treated with wild-type Cas9, sgRNA, and a single-stranded DNA donor template to mediate HDR at three of these loci C to T conversion efficiencies averaging only 0.7% were observed, with much higher relative indel formation averaging 3.9% (FIGS. 13A to 13C and FIG. 29C). The ratio of allele conversion to NHEJ outcomes averaged >1,000 for BE2, 23 for BE3, and 0.17 for wild-type Cas9 (FIG. 3c). We confirmed the permanence of base editing in human cells by monitoring editing efficiencies over multiple cell divisions in HEK293T cells at the HEK293 site 3 and 4 genomic loci (FIG. 38). These results collectively establish that nucleobase editing can effect much more efficient targeted single-base editing in human cells than Cas9-mediated HDR, and with much less (NBE3) or no (NBE2) indel formation.

[0456] Next, the off-target activity of NBE1, NBE2, and NBE3 in human cells was evaluated. The off-target activities of Cas9, dCas9, and Cas9 nickase have been extensively) studied (FIGS. 23 to 24 and 31 to 33).^{54,60-62} Because the sequence preference of rAPOBEC1 has been shown to be independent of DNA bases more than one base from the target C,⁶³ consistent with the sequence context independence observed in FIGS. 12A to 12B, it was assumed that potential off-target activity of nucleobase editors arises from off-target Cas9 binding. Since only a fraction of Cas9 off-target sites will have a C within the active window for nucleobase editing, off-target nucleobase editing sites should be a subset of the off-target sites of canonical Cas9 variants. For each of the six sites studied, the top ten known Cas9 off-target loci in human cells that were previously determined using the GUIDE-seq method were sequenced (FIGS. 23 to 27 and 31 to 33).^{54,61} Detectable off-target nucleobase editing at only a subset (16/34, 47% for NBE1 and NBE2, and 17/34, 50% for NBE3) of known dCas9 off-target loci was observed. In all cases, the off-target base-editing substrates contained a C within the five-base target window. In general, off-target C to T conversion paralleled off-target Cas9 nuclease-mediated genome modification frequencies (FIGS. 23 to 27). Also monitored were C to T conversions at 2,500 distinct cytosines surrounding the six on-target and 34 off-target loci tested, representing a total of 14,700,000 sequence reads derived from approximately 1.8×10⁶ cells, and observed no detectable increase in C to T conversions at any of these other sites upon NBE1, NBE2, or NBE3 treatment compared to that of untreated cells (FIG. 28). Taken together, these findings suggest that off-target substrates of nucleobase editors include a subset of Cas9 off-target substrates, and that nucleobase editors in human cells do not induce untargeted C to T conversion throughout the genome at levels that can be detected by the methods used here. No substantial change was observed in editing efficiency between non-passaged HEK293T cells (editing observed in 1.8% to 2.6% of sequenced strands for the three target Cs with BE2, and 6.2% to 14.3% with BE3) and cells that had undergone approximately five cell divisions after base editing (editing observed in 1.9% to 2.3% of sequenced strands for the same target Cs with BE2, and 6.4% to 14.5% with BE3), confirming that base edits in these cells are durable (Extended Data FIG. 6).

[0457] Finally, the potential of nucleobase editing to correct three disease-relevant mutations in mammalian cells was tested. The apolipoprotein E gene variant APOE4 encodes two Arg residues at amino acid positions 112 and 158, and is the largest and most common genetic risk factor for late-onset Alzheimer's disease.⁶⁴ ApoE variants with Cys residues in positions 112 or 158, including APOE2 (Cys112/Cys158), APOE3 (Cys112/Arg158), and APOE3′ (Arg112/Cys158) have been shown⁶⁵ or are presumed⁸¹ to confer substantially lower Alzheimer's disease risk than APOE4. Encouraged by the ability of NBE1 to convert APOE4 to APOE3′ in vitro (FIGS. 16A to 16B), this conversion was attempted in immortalized mouse astrocytes in which the endogenous murine APOE gene has been replaced by human APOE4 (Taconic). DNA encoding NBE3 and an appropriate sgRNA was delivered into these astrocytes by nucleofection (nucleofection efficiency of 25%), extracted genomic DNA from all treated cells two days later, and measured editing efficiency by HTS. Conversion of Arg158 to Cys158 was observed in 58-75% of total DNA sequencing reads (44% of nucleofected astrocytes) (FIGS. 14A to 14C and FIG. 30A). Also observed was 36-50% editing of total DNA at the third position of codon 158 and 38-55% editing of total DNA at the first position of Leu159, as expected since all three of these Cs are within the active nucleobase editing window. However, neither of the other two C→T conversions results in a change in the amino acid sequence of the ApoE3′ protein since both TGC and TGT encode Cys, and both CTG and TTG encode Leu. From >1,500,000 sequencing reads derived from 1×10⁶ cells evidence of 1.7% indels at the targeted locus following NBE3 treatment was observed (FIG. 35). In contrast, identical treatment of astrocytes with wt Cas9 and donor ssDNA resulted in 0.1-0.3% APOE4 correction and 26-40% indels at the targeted locus, efficiencies consistent with previous reports of single-base correction using Cas9 and HDR^{45,75} (FIG. 30A and FIG. 40A). Astrocytes treated identically but with an sgRNA targeting the VEGFA locus displayed no evidence of APOE4 base editing (FIG. 34 and FIG. 40A). These results demonstrate how nucleobase editors can effect precise, single-amino acid changes in the coding sequence of a protein as the major product of editing, even when their processivity results in more than one nucleotide change in genomic DNA. The off-target activities of Cas9, dCas9, and Cas9 nickase have been extensively studied.^{54, 60-62} In general, off-target C to T conversions by BE1, BE2, and BE3 paralleled off-target Cas9 nuclease-mediated genome modification frequencies.

[0458] The dominant-negative p53 mutations Tyr163Cys and Asn239Asp are strongly associated with several types of cancer.⁶⁶⁻⁶⁷ Both of these mutations can be corrected by a C to T conversion on the template strand (FIGS. 16A to 16B). A human breast cancer cell line homozygous for the p53 Tyr163Cys mutation (HCC1954 cells) was nucleofected with DNA encoding NBE3 and an sgRNA programmed to correct Tyr163Cys. Because the nucleofection efficiency of HCC1954 cells was <10%, a plasmid expressing IRFP was co-nucleofected into these cells to enable isolation of nucleofected cells by fluorescence-activated cell sorting two days after treatment. HTS of genomic DNA revealed correction of the Tyr163Cys mutation in 7.6% of nucleofected HCC1954 cells (FIG. 30B and FIG. 40A to 40B). Also nucleofected was a human lymphoma cell line that is heterozygous for p53 Asn239Asp (ST486 cells) with DNA encoding NBE2 and an sgRNA programmed to correct Asn239Asp with 92% nucleofection efficiency). Correction of the Asn239Asp mutation was observed in 11% of treated ST486 cells (12% of nucleofected ST486 cells). Consistent with the findings in HEK cells, no indels were observed from the treatment of ST486 cells with NBE2, and 0.6% indel formation from the treatment of HCC1954 cells with NBE3. No other DNA changes within at least 50 base pairs of both sides of the protospacer were detected at frequencies above that of untreated controls out of >2,000,000 sequencing reads derived from 2×10⁵ cells (FIGS. 14A to 14C, FIG. 30B). These results collectively represent the conversion of three disease-associated alleles in genomic DNA into their wild-type forms with an efficiency and lack of other genome modification events that is, to our knowledge, not currently achievable using other methods.

[0459] To illuminate the potential relevance of nucleobase editors to address human genetic diseases, the NCBI ClinVar database⁶⁸ was searched for known genetic diseases that could in principle be corrected by this approach. ClinVar was filtered by first examining only single nucleotide polymorphisms (SNPs), then removing any nonpathogenic variants. Out of the 24,670 pathogenic SNPs, 3,956 are caused by either a T to C, or an A to G, substitution. This list was further filtered to only include variants with a nearby NGG PAM that would position the SNP within the deamination activity window, resulting in 1,089 clinically relevant pathogenic gene variants that could in principle be corrected by the nucleobase editors described here (FIG. 21).

[0460] In some embodiments, any of the base editors provided herein may be used to treat a disease or disorder. For example, any base editors provided herein may be used to correct one or more mutations associated with any of the diseases or disorders provided herein. Exemplary diseases or disorders that may be treated include, without limitation, 3-Methylglutaconic aciduria type 2, 46,XY gonadal dysgenesis, 4-Alpha-hydroxyphenylpyruvate hydroxylase deficiency, 6-pyruvoyl-tetrahydropterin synthase deficiency, achromatopsia, Acid-labile subunit deficiency, Acrodysostosis, acroerythrokeratoderma, ACTH resistance, ACTH-independent macronodular adrenal hyperplasia, Activated PI3K-delta syndrome, Acute intermittent porphyria, Acute myeloid leukemia, Adams-Oliver syndrome 1/5/6, Adenylosuccinate lyase deficiency, Adrenoleukodystrophy, Adult neuronal ceroid lipofuscinosis, Adult onset ataxia with oculomotor apraxia, Advanced sleep phase syndrome, Age-related macular degeneration, Alagille syndrome, Alexander disease, Allan-Herndon-Dudley syndrome, Alport syndrome, X-linked recessive, Alternating hemiplegia of childhood, Alveolar capillary dysplasia with misalignment of pulmonary veins, Amelogenesis imperfecta, Amyloidogenic transthyretin amyloidosis, Amyotrophic lateral sclerosis, Anemia (nonspherocytic hemolytic, due to G6PD deficiency), Anemia (sideroblastic, pyridoxine-refractory, autosomal recessive), Anonychia, Antithrombin III deficiency, Aortic aneurysm, Aplastic anemia, Apolipoprotein C2 deficiency, Apparent mineralocorticoid excess, Aromatase deficiency, Arrhythmogenic right ventricular cardiomyopathy, Familial hypertrophic cardiomyopathy, Hypertrophic cardiomyopathy, Arthrogryposis multiplex congenital, Aspartylglycosaminuria, Asphyxiating thoracic dystrophy, Ataxia with vitamin E deficiency, Ataxia (spastic), Atrial fibrillation, Atrial septal defect, atypical hemolytic-uremic syndrome, autosomal dominant CD11C+/CD1C+ dendritic cell deficiency, Autosomal dominant progressive external ophthalmoplegia with mitochondrial DNA deletions, Baraitser-Winter syndrome, Bartter syndrome, Basa ganglia calcification, Beckwith-Wiedemann syndrome, Benign familial neonatal seizures, Benign scapuloperoneal muscular dystrophy, Bernard Soulier syndrome, Beta thalassemia intermedia, Beta-D-mannosidosis, Bietti crystalline corneoretinal dystrophy, Bile acid malabsorption, Biotinidase deficiency, Borjeson-Forssman-Lehmann syndrome, Boucher Neuhauser syndrome, Bowen-Conradi syndrome, Brachydactyly, Brown-Vialetto-Van laere syndrome, Brugada syndrome, Cardiac arrhythmia, Cardiofaciocutaneous syndrome, Cardiomyopathy, Carnevale syndrome, Carnitine palmitoyltransferase II deficiency, Carpenter syndrome, Cataract, Catecholaminergic polymorphic ventricular tachycardia, Central core disease, Centromeric instability of chromosomes 1,9 and 16 and immunodeficiency, Cerebral autosomal dominant arteriopathy, Cerebro-oculo-facio-skeletal syndrome, Ceroid lipofuscinosis, Charcot-Marie-Tooth disease, Cholestanol storage disease, Chondrocalcinosis, Chondrodysplasia, Chronic progressive multiple sclerosis, Coenzyme Q10 deficiency, Cohen syndrome, Combined deficiency of factor V and factor VIII, Combined immunodeficiency, Combined oxidative phosphorylation deficiency, Combined partial 17-alpha-hydroxylase/17,20-lyase deficiency, Complement factor d deficiency, Complete combined 17-alpha-hydroxylase/17,20-lyase deficiency, Cone-rod dystrophy, Congenital contractural arachnodactyly, Congenital disorder of glycosylation, Congenital lipomatous overgrowth, Neoplasm of ovary, PIK3CA Related Overgrowth Spectrum, Congenital long QT syndrome, Congenital muscular dystrophy, Congenital muscular hypertrophy-cerebral syndrome, Congenital myasthenic syndrome, Congenital myopathy with fiber type disproportion, Eichsfeld type congenital muscular dystrophy, Congenital stationary night blindness, Corneal dystrophy, Cornelia de Lange syndrome, Craniometaphyseal dysplasia, Crigler Najjar syndrome, Crouzon syndrome, Cutis laxa with osteodystrophy, Cyanosis, Cystic fibrosis, Cystinosis, Cytochrome-c oxidase deficiency, Mitochondrial complex I deficiency, D-2-hydroxyglutaric aciduria, Danon disease, Deafness with labyrinthine aplasia microtia and microdontia (LAMM), Deafness, Deficiency of acetyl-CoA acetyltransferase, Deficiency of ferroxidase, Deficiency of UDPglucose-hexose-1-phosphate uridylyltransferase, Dejerine-Sottas disease, Desbuquois syndrome, DFNA, Diabetes mellitus type 2, Diabetes-deafness syndrome, Diamond-Blackfan anemia, Diastrophic dysplasia, Dihydropteridine reductase deficiency, Dihydropyrimidinase deficiency, Dilated cardiomyopathy, Disseminated atypical mycobacterial infection, Distal arthrogryposis, Distal hereditary motor neuronopathy, Donnai Barrow syndrome, Duchenne muscular dystrophy, Becker muscular dystrophy, Dyschromatosis universalis hereditaria, Dyskeratosis congenital, Dystonia, Early infantile epileptic encephalopathy, Ehlers-Danlos syndrome, Eichsfeld type congenital muscular dystrophy, Emery-Dreifuss muscular dystrophy, Enamel-renal syndrome, Epidermolysis bullosa dystrophica inversa, Epidermolysis bullosa herpetiformis, Epilepsy, Episodic ataxia, Erythrokeratodermia variabilis, Erythropoietic protoporphyria, Exercise intolerance, Exudative vitreoretinopathy, Fabry disease, Factor V deficiency, Factor VII deficiency, Factor xiii deficiency, Familial adenomatous polyposis, breast cancer, ovarian cancer, cold urticarial, chronic infantile neurological, cutaneous and articular syndrome, hemiplegic migraine, hypercholesterolemia, hypertrophic cardiomyopathy, hypoalphalipoproteinemia, hypokalemia-hypomagnesemia, juvenile gout, hyperlipoproteinemia, visceral amyloidosis, hypophosphatemic vitamin D refractory rickets, FG syndrome, Fibrosis of extraocular muscles, Finnish congenital nephrotic syndrome, focal epilepsy, Focal segmental glomerulosclerosis, Frontonasal dysplasia, Frontotemporal dementia, Fructose-biphosphatase deficiency, Gamstorp-Wohlfart syndrome, Ganglioside sialidase deficiency, GATA-1-related thrombocytopenia, Gaucher disease, Giant axonal neuropathy, Glanzmann thrombasthenia, Glomerulocystic kidney disease, Glomerulopathy, Glucocorticoid resistance, Glucose-6-phosphate transport defect, Glutaric aciduria, Glycogen storage disease, Gorlin syndrome, Holoprosencephaly, GRACILE syndrome, Haemorrhagic telangiectasia, Hemochromatosis, Hemoglobin H disease, Hemolytic anemia, Hemophagocytic lymphohistiocytosis, Carcinoma of colon, Myhre syndrome, leukoencephalopathy, Hereditary factor IX deficiency disease, Hereditary factor VIII deficiency disease, Hereditary factor XI deficiency disease, Hereditary fructosuria, Hereditary Nonpolyposis Colorectal Neoplasm, Hereditary pancreatitis, Hereditary pyropoikilocytosis, Elliptocytosis, Heterotaxy, Heterotopia, Histiocytic medullary reticulosis, Histiocytosis-lymphadenopathy plus syndrome, HNSHA due to aldolase A deficiency, Holocarboxylase synthetase deficiency, Homocysteinemia, Howel-Evans syndrome, Hydatidiform mole, Hypercalciuric hypercalcemia, Hyperimmunoglobulin D, Mevalonic aciduria, Hyperinsulinemic hypoglycemia, Hyperkalemic Periodic Paralysis, Paramyotonia congenita of von Eulenburg, Hyperlipoproteinemia, Hypermanganesemia, Hypermethioninemia, Hyperphosphatasemia, Hypertension, hypomagnesemia, Hypobetalipoproteinemia, Hypocalcemia, Hypogonadotropic hypogonadism, Hypogonadotropic hypogonadism, Hypohidrotic ectodermal dysplasia, Hyper-IgM immunodeficiency, Hypohidrotic X-linked ectodermal dysplasia, Hypomagnesemia, Hypoparathyroidism, Idiopathic fibrosing alveolitis, Immunodeficiency, Immunoglobulin A deficiency, Infantile hypophosphatasia, Infantile Parkinsonism-dystonia, Insulin-dependent diabetes mellitus, Intermediate maple syrup urine disease, Ischiopatellar dysplasia, Islet cell hyperplasia, Isolated growth hormone deficiency, Isolated lutropin deficiency, Isovaleric acidemia, Joubert syndrome, Juvenile polyposis syndrome, Juvenile retinoschisis, Kallmann syndrome, Kartagener syndrome, Kugelberg-Welander disease, Lattice corneal dystrophy, Leber congenital amaurosis, Leber optic atrophy, Left ventricular noncompaction, Leigh disease, Mitochondrial complex I deficiency, Leprechaunism syndrome, Arthrogryposis, Anterior horn cell disease, Leukocyte adhesion deficiency, Leukodystrophy, Leukoencephalopathy, Ovarioleukodystrophy, L-ferritin deficiency, Li-Fraumeni syndrome, Limb-girdle muscular dystrophy-dystroglycanopathy, Loeys-Dietz syndrome, Long QT syndrome, Macrocephaly/autism syndrome, Macular corneal dystrophy, Macular dystrophy, Malignant hyperthermia susceptibility, Malignant tumor of prostate, Maple syrup urine disease, Marden Walker like syndrome, Marfan syndrome, Marie Unna hereditary hypotrichosis, Mast cell disease, Meconium ileus, Medium-chain acyl-coenzyme A dehydrogenase deficiency, Melnick-Fraser syndrome, Mental retardation, Merosin deficient congenital muscular dystrophy, Mesothelioma, Metachromatic leukodystrophy, Metaphyseal chondrodysplasia, Methemoglobinemia, methylmalonic aciduria, homocystinuria, Microcephaly, chorioretinopathy, lymphedema, Microphthalmia, Mild non-PKU hyperphenylalanemia, Mitchell-Riley syndrome, mitochondrial 3-hydroxy-3-methylglutaryl-CoA synthase deficiency, Mitochondrial complex I deficiency, Mitochondrial complex III deficiency, Mitochondrial myopathy, Mucolipidosis III, Mucopolysaccharidosis, Multiple sulfatase deficiency, Myasthenic syndrome, Mycobacterium tuberculosis, Myeloperoxidase deficiency, Myhre syndrome, Myoclonic epilepsy, Myofibrillar myopathy, Myoglobinuria, Myopathy, Myopia, Myotonia congenital, Navajo neurohepatopathy, Nemaline myopathy, Neoplasm of stomach, Nephrogenic diabetes insipidus, Nephronophthisis, Nephrotic syndrome, Neurofibromatosis, Neutral lipid storage disease, Niemann-Pick disease, Non-ketotic hyperglycinemia, Noonan syndrome, Noonan syndrome-like disorder, Norum disease, Macular degeneration, N-terminal acetyltransferase deficiency, Oculocutaneous albinism, Oculodentodigital dysplasia, Ohdo syndrome, Optic nerve aplasia, Ornithine carbamoyltransferase deficiency, Orofaciodigital syndrome, Osteogenesis imperfecta, Osteopetrosis, Ovarian dysgenesis, Pachyonychia, Palmoplantar keratoderma, nonepidermolytic, Papillon-Lef\xc3\xa8vre syndrome, Haim-Munk syndrome, Periodontitis, Peeling skin syndrome, Pendred syndrome, Peroxisomal fatty acyl-coa reductase 1 disorder, Peroxisome biogenesis disorder, Pfeiffer syndrome, Phenylketonuria, Phenylketonuria, Hyperphenylalaninemia, non-PKU, Pituitary hormone deficiency, Pityriasis rubra pilaris, Polyarteritis nodosa, Polycystic kidney disease, Polycystic lipomembranous osteodysplasia, Polymicrogyria, Pontocerebellar hypoplasia, Porokeratosis, Posterior column ataxia, Primary erythromelalgia, hyperoxaluria, Progressive familial intrahepatic cholestasis, Progressive pseudorheumatoid dysplasia, Propionic acidemia, Pseudohermaphroditism, Pseudohypoaldosteronism, Pseudoxanthoma elasticum-like disorder, Purine-nucleoside phosphorylase deficiency, Pyridoxal 5-phosphate-dependent epilepsy, Renal dysplasia, retinal pigmentary dystrophy, cerebellar ataxia, skeletal dysplasia, Reticular dysgenesis, Retinitis pigmentosa, Usher syndrome, Retinoblastoma, Retinopathy, RRM2B-related mitochondrial disease, Rubinstein-Taybi syndrome, Schnyder crystalline corneal dystrophy, Sebaceous tumor, Severe congenital neutropenia, Severe myoclonic epilepsy in infancy, Severe X-linked myotubular myopathy, onychodysplasia, facial dysmorphism, hypotrichosis, Short-rib thoracic dysplasia, Sialic acid storage disease, Sialidosis, Sideroblastic anemia, Small fiber neuropathy, Smith-Magenis syndrome, Sorsby fundus dystrophy, Spastic ataxia, Spastic paraplegia, Spermatogenic failure, Spherocytosis, Sphingomyelin/cholesterol lipidosis, Spinocerebellar ataxia, Split-hand/foot malformation, Spondyloepimetaphyseal dysplasia, Platyspondylic lethal skeletal dysplasia, Squamous cell carcinoma of the head and neck, Stargardt disease, Sucrase-isomaltase deficiency, Sudden infant death syndrome, Supravalvar aortic stenosis, Surfactant metabolism dysfunction, Tangier disease, Tatton-Brown-rahman syndrome, Thoracic aortic aneurysms and aortic dissections, Thrombophilia, Thyroid hormone resistance, TNF receptor-associated periodic fever syndrome (TRAPS), Tooth agenesis, Torsades de pointes, Transposition of great arteries, Treacher Collins syndrome, Tuberous sclerosis syndrome, Tyrosinase-negative oculocutaneous albinism, Tyrosinase-positive oculocutaneous albinism, Tyrosinemia, UDPglucose-4-epimerase deficiency, Ullrich congenital muscular dystrophy, Bethlem myopathy Usher syndrome, UV-sensitive syndrome, Van der Woude syndrome, popliteal pterygium syndrome, Very long chain acyl-CoA dehydrogenase deficiency, Vesicoureteral reflux, Vitreoretinochoroidopathy, Von Hippel-Lindau syndrome, von Willebrand disease, Waardenburg syndrome, Warsaw breakage syndrome, WFS1-Related Disorders, Wilson disease, Xeroderma pigmentosum, X-linked agammaglobulinemia, X-linked hereditary motor and sensory neuropathy, X-linked severe combined immunodeficiency, and Zellweger syndrome.

[0461] The development of nucleobase editing advances both the scope and effectiveness of genome editing. The nucleobase editors described here offer researchers a choice of editing with virtually no indel formation (NBE2), or more efficient editing with a low frequency (here, typically ≤1%) of indel formation (NBE3). That the product of base editing is, by definition, no longer a substrate likely contributes to editing efficiency by preventing subsequent product transformation, which can hamper traditional Cas9 applications. By removing the reliance on double-stranded DNA cleavage and stochastic DNA repair processes that vary greatly by cell state and cell type, nucleobase editing has the potential to expand the type of genome modifications that can be cleanly installed, the efficiency of these modifications, and the type of cells that are amenable to editing. It is likely that recent engineered Cas9 variants^{69,70,82} or delivery methods⁷¹ with improved DNA specificity, as well as Cas9 variants with altered PAM specificities,⁷² can be integrated into this strategy to provide additional nucleobase editors with improved DNA specificity or that can target an even wider range of disease-associated mutations. These findings also suggest that engineering additional fusions of dCas9 with enzymes that catalyze additional nucleobase transformations will increase the fraction of the possible DNA base changes that can be made through nucleobase editing. These results also suggest architectures for the fusion of other DNA-modifying enzymes, including methylases and demathylases, that mau enable additional types of programmable genome and epigenome base editing.

### Materials and Methods

[0462] Cloning.

[0463] DNA sequences of all constructs and primers used in this paper are listed in the Supplementary Sequences. Plasmids containing genes encoding NBE1, NBE2, and NBE3 will be available from Addgene. PCR was performed using VeraSeq ULtra DNA polymerase (Enzymatics), or Q5 Hot Start High-Fidelity DNA Polymerase (New England Biolabs). NBE plasmids were constructed using USER cloning (New England Biolabs). Deaminase genes were synthesized as gBlocks Gene Fragments (Integrated DNA Technologies), and Cas9 genes were obtained from previously reported plasmids.¹⁸ Deaminase and fusion genes were cloned into pCMV (mammalian codon-optimized) or pET28b (E. coli codon-optimized) backbones. sgRNA expression plasmids were constructed using site-directed mutagenesis. Briefly, the primers listed in the Supplementary Sequences were 5′ phosphorylated using T4 Polynucleotide Kinase (New England Biolabs) according to the manufacturer's instructions. Next, PCR was performed using Q5 Hot Start High-Fidelity Polymerase (New England Biolabs) with the phosphorylated primers and the plasmid pFYF1320 (EGFP sgRNA expression plasmid) as a template according to the manufacturer's instructions. PCR products were incubated with DpnI (20 U, New England Biolabs) at 37° C. for 1 h, purified on a QIAprep spin column (Qiagen), and ligated using QuickLigase (New England Biolabs) according to the manufacturer's instructions. DNA vector amplification was carried out using Mach1 competent cells (ThermoFisher Scientific).

[0464] In Vitro Deaminase Assay on ssDNA.

[0465] Sequences of all ssDNA substrates are listed in the Supplementary Sequences. All Cy3-labelled substrates were obtained from Integrated DNA Technologies (IDT). Deaminases were expressed in vitro using the TNT T7 Quick Coupled Transcription/Translation Kit (Promega) according to the manufacturer's instructions using 1 μg of plasmid. Following protein expression, 5 μL of lysate was combined with 35 μL of ssDNA (1.8 μM) and USER enzyme (1 unit) in CutSmart buffer (New England Biolabs) (50 mM potassium acetate, 29 mM Trisacetate, 10 mM magnesium acetate, 100 ug/mL BSA, pH 7.9) and incubated at 37° C. for 2 h. Cleaved U-containing substrates were resolved from full-length unmodified substrates on a 10% TBE-urea gel (Bio-Rad).

[0466] Expression and Purification of His₆-rAPOBEC1-Linker-dCas9 Fusions.

[0467] E. Coli BL21 STAR (DE3)-competent cells (ThermoFisher Scientific) were transformed with plasmids encoding pET28b-His₆-rAPOBEC-linker-dCas9 with GGS, (GGS)₃, (SEQ ID NO: 610) XTEN, or (GGS)₇ (SEQ ID NO: 610) linkers. The resulting expression strains were grown overnight in Luria-Bertani (LB) broth containing 100 μg/mL of kanamycin at 37° C. The cells were diluted 1:100 into the same growth medium and grown at 37° C. to OD₆₀₀=˜0.6. The culture was cooled to 4° C. over a period of 2 h, and isopropyl-β-D-1-thiogalactopyranoside (IPTG) was added at 0.5 mM to induce protein expression. After ˜16 h, the cells were collected by centrifugation at 4,000 g and resuspended in lysis buffer (50 mM tris(hydroxymethyl)-aminomethane (Tris)-HCl, pH 7.0, 1 M NaCl, 20% glycerol, 10 mM tris(2-carboxyethyl)phosphine (TCEP, Softer; Ventures)). The cells were lysed by sonication (20 s pulse-on, 20 s pulse-off for 8 min total at 6 W output) and the lysate supernatant was isolated following centrifugation at 25,000 g for 15 min. The lysate was incubated with His-Pur nickel-nitriloacetic acid (nickel-NTA) resin (ThermoFisher Scientific) at 4° C. for 1 h to capture the His-tagged fusion protein. The resin was transferred to a column and washed with 40 mL of lysis buffer. The His-tagged fusion protein was eluted in lysis buffer supplemented with 285 mM imidazole, and concentrated by ultrafiltration (Amicon-Millipore, 100-kDa molecular weight cut-off) to 1 mL total volume. The protein was diluted to 20 mL in low-salt purification buffer containing 50 mM tris(hydroxymethyl)-aminomethane (Tris)-HCl, pH 7.0, 0.1 M NaCl, 20% glycerol, 1.0 mM TCEP and loaded onto SP Sepharose Fast Flow resin (GE Life Sciences). The resin was washed with 40 mL of this low-salt buffer, and the protein eluted with 5 mL of activity buffer containing 50 mM tris(hydroxymethyl)-aminomethane, (Tris)-HCl, pH 7.0, 0.5 M NaCl, 20% glycerol, 10 mM TCEP. The eluted proteins were quantified on a SDSPAGE gel.

[0468] In Vitro Transcription of sgRNAs.

[0469] Linear DNA fragments containing the T7 promoter followed by the 20-bp sgRNA target sequence were transcribed in vitro using the primers listed in the Supplementary Sequences with the TranscriptAid T7 High Yield Transcription Kit (ThermoFisher Scientific) according to the manufacturer's instructions. sgRNA products were purified using the MEGAclear Kit (ThermoFisher Scientific) according to the manufacturer's instructions and quantified by UV absorbance.

[0470] Preparation of Cy3-Conjugated dsDNA Substrates.

[0471] Sequences of 80-nucleotide unlabeled strands are listed in the Supplementary Sequences and were ordered as PAGE-purified oligonucleotides from IDT. The 25-nt Cy3-labeled primer listed in the Supplementary Sequences is complementary to the 3′ end of each 80-nt substrate. This primer was ordered as an HPLC-purified oligonucleotide from IDT. To generate the Cy3-labeled dsDNA substrates, the 80-nt strands (5 μL of a 100 μM solution) were combined with the Cy3-labeled primer (5 pt of a 100 μM solution) in NEBuffer 2 (38.25 μL of a 50 mM NaCl, 10 mMTris-HCl, 10 mM MgCl₂, 1 mM DTT, pH 7.9 solution, New England Biolabs) with dNTPs (0.75 μL of a 100 mM solution) and heated to 95° C. for 5 min, followed by a gradual cooling to 45° C. at a rate of 0.1° C./s. After this annealing period, Klenow exo⁻ (5 U, New England Biolabs) was added and the reaction was incubated at 37° C. for 1 h. The solution was diluted with Buffer PB (250 Qiagen) and isopropanol (50 μL) and purified on a QIAprep spin column (Qiagen), eluting with 50 μL of Tris buffer.

[0472] Deaminase Assay on dsDNA.

[0473] The purified fusion protein (20 μL of 1.9 μM in activity buffer) was combined with 1 equivalent of appropriate sgRNA and incubated at ambient temperature for 5 min. The Cy3-labeled dsDNA substrate was added to final concentration of 125 nM and the resulting solution was incubated at 37° C. for 2 h. The dsDNA was separated from the fusion by the addition of Buffer PB (100 μL, Qiagen) and isopropanol (25 μL) and purified on a EconoSpin micro spin column (Epoch Life Science), eluting with 20 μL of CutSmart buffer (New England Biolabs). USER enzyme (1 U, New England Biolabs) was added to the purified, edited dsDNA and incubated at 37° C. for 1 h. The Cy3-labeled strand was fully denatured from its complement by combining 5 μL of the reaction solution with 15 μL of a DMSO-based loading buffer (5 mM Tris, 0.5 mM EDTA, 12.5% glycerol, 0.02% bromophenol blue, 0.02% xylene cyan, 80% DMSO). The full-length C-containing substrate was separated from any cleaved, U-containing edited substrates on a 10% TBE-urea gel (Bio-Rad) and imaged on a GE Amersham Typhoon imager.

[0474] Preparation of In Vitro-Edited dsDNA for High-Throughput Sequencing (HTS).

[0475] The oligonucleotides listed in the Supplementary Sequences were obtained from IDT. Complementary sequences were combined (5 μL of a 100 μM solution) in Tris buffer and annealed by heating to 95° C. for 5 min, followed by a gradual cooling to 45° C. at a rate of 0.1° C./s to generate 60-bp dsDNA substrates. Purified fusion protein (20 μL of 1.9 μM in activity buffer) was combined with 1 equivalent of appropriate sgRNA and incubated at ambient temperature for 5 min. The 60-mer dsDNA substrate was added to final concentration of 125 nM and the resulting solution was incubated at 37° C. for 2 h. The dsDNA was separated from the fusion by the addition of Buffer PB (100 μL, Qiagen) and isopropanol (25 μL) and purified on a EconoSpin micro spin column (Epoch Life Science), eluting with 20 μL of Tris buffer. The resulting edited DNA (1 μL was used as a template) was amplified by PCR using the HTS primer pairs specified in the Supplementary Sequences and VeraSeq Ultra (Enzymatics) according to the manufacturer's instructions with 13 cycles of amplification. PCR reaction products were purified using RapidTips (Diffinity Genomics), and the purified DNA was amplified by PCR with primers containing sequencing adapters, purified, and sequenced on a MiSeq high-throughput DNA sequencer (Illumina) as previously described.⁷³

[0476] Cell Culture.

[0477] HEK293T (ATCC CRL-3216), U2OS (ATCC-HTB-96) and ST486 cells (ATCC) were maintained in Dulbecco's Modified Eagle's Medium plus GlutaMax (ThermoFisher) supplemented with 10% (v/v) fetal bovine serum (FBS) and penicillin/streptomycin (1×, Amresco), at 37° C. with 5% CO₂. HCC1954 cells (ATCC CRL-2338) were maintained in RPMI-1640 medium (ThermoFisher Scientific) supplemented as described above. Immortalized rat astrocytes containing the ApoE4 isoform of the APOE gene (Taconic Biosciences) were cultured in Dulbecco's Modified Eagle's Medium plus GlutaMax (ThermoFisher Scientific) supplemented with 10% (v/v) fetal bovine serum (FBS) and 200 μg/mL Geneticin (ThermoFisher Scientific).

[0478] Transfections.

[0479] HEK293T cells were seeded on 48-well collagen-coated BioCoat plates (Corning) and transfected at approximately 85% confluency. Briefly, 750 ng of NBE and 250 ng of sgRNA expression plasmids were transfected using 1.5 μl of Lipofectamine 2000 (ThermoFisher Scientific) per well according to the manufacturer's protocol. Astrocytes, U2OS, HCC1954, HEK293T and ST486 cells were transfected using appropriate AMAXA NUCLEOFECTOR™ II programs according to manufacturer's instructions. 40 ng of infrared RFP (Addgene plasmid 45457)⁷⁴ was added to the nucleofection solution to assess nucleofection efficiencies in these cell lines. For astrocytes, U2OS, and ST486 cells, nucleofection efficiencies were 25%, 74%, and 92%, respectively. For HCC1954 cells, nucleofection efficiency was <10%. Therefore, following trypsinization, the HCC1954 cells were filtered through a 40 micron strainer (Fisher Scientific), and the nucleofected HCC1954 cells were collected on a Beckman Coulter MoFlo XDP Cell Sorter using the iRFP signal (abs 643 nm, em 670 nm). The other cells were used without enrichment of nucleofected cells.

[0480] High-Throughput DNA Sequencing of Genomic DNA Samples.

[0481] Transfected cells were harvested after 3 d and the genomic DNA was isolated using the Agencourt DNAdvance Genomic DNA Isolation Kit (Beckman Coulter) according to the manufacturer's instructions. On-target and off-target genomic regions of interest were amplified by PCR with flanking HTS primer pairs listed in the Supplementary Sequences. PCR amplification was carried out with Phusion high-fidelity DNA polymerase (ThermoFisher) according to the manufacturer's instructions using 5 ng of genomic DNA as a template. Cycle numbers were determined separately for each primer pair as to ensure the reaction was stopped in the linear range of amplification (30, 28, 28, 28, 32, and 32 cycles for EMX1, FANCF, HEK293 site 2, HEK293 site 3, HEK293 site 4, and RNF2 primers, respectively). PCR products were purified using RapidTips (Diffinity Genomics). Purified DNA was amplified by PCR with primers containing sequencing adaptors. The products were gel-purified and quantified using the QUANT-IT™ PicoGreen dsDNA Assay Kit (ThermoFisher) and KAPA Library Quantification Kit-Illumina (KAPA Biosystems). Samples were sequenced on an Illumina MiSeq as previously described.⁷³

[0482] Data Analysis.

[0483] Sequencing reads were automatically demultiplexed using MiSeq Reporter (Illumina), and individual FASTQ files were analyzed with a custom Matlab script provided in the Supplementary Notes. Each read was pairwise aligned to the appropriate reference sequence using the Smith-Waterman algorithm. Base calls with a Q-score below 31 were replaced with N's and were thus excluded in calculating nucleotide frequencies. This treatment yields an expected MiSeq base-calling error rate of approximately 1 in 1,000. Aligned sequences in which the read and reference sequence contained no gaps were stored in an alignment table from which base frequencies could be tabulated for each locus.

[0484] Indel frequencies were quantified with a custom Matlab script shown in the Supplementary Notes using previously described criteria⁷¹. Sequencing reads were scanned for exact matches to two 10-bp sequences that flank both sides of a window in which indels might occur. If no exact matches were located, the read was excluded from analysis. If the length of this indel window exactly matched the reference sequence the read was classified as not containing an indel. If the indel window was two or more bases longer or shorter than the reference sequence, then the sequencing read was classified as an insertion or deletion, respectively.

[0485] All publications, patents, patent applications, publication, and database entries (e.g., sequence database entries) mentioned herein, e.g., in the Background, Summary, Detailed Description, Examples, and/or References sections, are hereby incorporated by reference in their entirety as if each individual publication, patent, patent application, publication, and database entry was specifically and individually incorporated herein by reference. In case of conflict, the present application, including any definitions herein, will control.

### Supplementary Sequences

[0486] Primers Used for Generating sgRNA Transfection Plasmids.

[0487] rev_sgRNA_plasmid was used in all cases. The pFYF1320 plasmid was used as template as noted in Materials and Methods section. SEQ ID NOs: 187-196 appear from top to bottom below, respectively.

| | |
|---|---|
| rev_sgRNA_plasmid | GGTGTTTCGTCCTTTCCACAAG |
| fxd_p53_Y163C | GCTTGCAGATGGCCATGGCGGTTTTAGAGCTAGAAATAGCAAGTTAAAATAAGGC |
| fwd_p53_N239D | TGTCACACATGTAGTTGTAGGTTTTAGAGCTAGAAATAGCAAGTTAAAATAAGGC |
| fwd_APOE4_C158R | GAAGCGCCTGGCAGTGTACCGTTTTAGAGCTAGAAATAGCAAGTTAAAATAAGGC |
| fwd_EMX1 | GAGTCCGAGCAGAAGAAGAAGTTTTAGAGCTAGAAATAGCAAGTTAAAATAAGGC |
| fwd_FANCF | GGAATCCCTTCTGCAGCACCGTTTTAGAGCTAGAAATAGCAAGTTAAAATAAGGC |
| fwd_HEK293_2 | GAACACAAAGCATAGACTGCGTTTTAGAGCTAGAAATAGCAAGTTAAAATAAGGC |
| fwd_HEK293_3 | GGCCCAGACTGAGCACGTGAGTTTTAGAGCTAGAAATAGCAAGTTAAAATAAGGC |
| fwd_HEK293_4 | GGCACTGCGGCTGGAGGTGGGTTTTAGAGCTAGAAATAGCAAGTTAAAATAAGGC |
| fwd_RNF2 | GTCATCTTAGTCATTACCTGGTTTTAGAGCTAGAAATAGCAAGTTAAAATAAGGC |

[0488] Sequences of all ssDNA Substrates Used in In Vitro Deaminase Assays.

[0489] SEQ ID NOs: 197-199 appear from top to bottom below, respectively.

| | |
|---|---|
| rAPOBEC1 | Cy3-ATTATTATTATTCCGCGGATTTATTTATTTATTTA |
| substrate | TTTATTT |
| hAID/pmCDA1 | Cy3-ATTATTATTATTAGCTATTTATTTATTTATTTATT |
| substrate | TATTT |
| hAPOBEC3G | Cy3-ATTATTATTATTCCCGGATTTATTTATTTATTTAT |
| substrate | TTATTT |

[0490] Primers Used for Generating PCR Products to Serve as Substrates for T7 Transcription of sgRNAs for Gel-Based Deaminase Assay.

[0491] rev_gRNA_T7 was used in all cases. The pFYF1320 plasmid was used as template as noted in Materials and Methods section. SEQ ID NOs: 200-223 appear from top to bottom below, respectively.

| | |
|---|---|
| rev_sgRNA_T7 | AAAAAAAGCACCGACTCGGTG |
| fwd_sgRNA_T7_dsDNA_2 | TAATACGACTCACTATAGGCCGCGGATTTATTTATTTAAGTTTTAGAGCTAGAAATAGCA |
| fwd_sgRNA_T7_dsDNA_3 | TAATACGACTCACTATAGGTCCGCGGATTTATTTATTTAGTTTTAGAGCTAGAAATAGCA |
| fwd_sgRNA_T7_dsDNA_4 | TAATACGACTCACTATAGGTTCCGCGGATTTATTTATTAGTTTTAGAGCTAGAAATAGCA |
| fwd_sgRNA_T7_dsDNA_5 | TAATACGACTCACTATAGGATTCCGCGGATTTATTTATTGTTTTAGAGCTAGAAATAGCA |
| fwd_sgRNA_T7_dsDNA_6 | TAATACGACTCACTATAGGTATTCCGCGGATTTATTTATGTTTTAGAGCTAGAAATAGCA |
| fwd_sgRNA_T7_dsDNA_7 | TAATACGACTCACTATAGGTTATTCCGCGGATTTATTTAGTTTTAGAGCTAGAAATAGCA |
| fwd_sgRNA_T7_dsDNA_8 | TAATACGACTCACTATAGGATTATTCCGCGGATTTATTTGTTTTAGAGCTAGAAATAGCA |
| fwd_sgRNA_T7_dsDNA_9 | TAATACGACTCACTATAGGTATTATTCCGCGGATTTATTGTTTTAGAGCTAGAAATAGCA |
| fwd_sgRNA_T7_dsDNA_10 | TAATACGACTCACTATAGGATTATTATCCGCGGATTTATGTTTTAGAGCTAGAAATAGCA |
| fwd_sgRNA_T7_dsDNA_11 | TAATACGACTCACTATAGGTATTATATTCCGCGGATTTAGTTTTAGAGCTAGAAATAGCA |
| twd_sgRNA_T7_dsDNA_12 | TAATACGACTCACTATAGGTTATTATATTCCGCGGATTTGTTTTAGAGCTAGAAATAGCA |
| fwd_sgRNA_T7_dsDNA_13 | TAATACGACTCACTATAGGATTATTATATTCCGCGGATTGTTTTAGAGCTAGAAATAGCA |
| fwd_sgRNA_T7_dsDNA_14 | TAATACGACTCACTATAGGTATTATTATATTCCGCGGATGTTTTAGAGCTAGAAATAGCA |
| fwd_sgRNA_T7_dsDNA_15 | TAATACGACTCACTATAGGATTATTATTATTACCGCGGAGTTTTAGAGCTAGAAATAGCA |
| fwd_sgRNA_T7_dsDNA_18 | TAATACGACTCACTATAGGATTATTATTATTATTACCGCGTTTTAGAGCTAGAAATAGCA |
| fwd_sgRNA_T7_dsDNA_noC | TAATACGACTCACTATAGGATATTAATTTATTTATTTAAGTTTTAGAGCTAGAAATAGCA |
| fwd_sgRNA_T7_dsDNA_APOE4_C112R | TAATACGACTCACTATAGGGGAGGACGTGCGCGGCCGCCGTTTTAGAGCTAGAAATAGCA |
| fwd_sgRNA_T7_dsDNA_APOE4_C158R | TAATACGACTCACTATAGGGAAGCGCCTGGCAGTGTACCGTTTTAGAGCTAGAAATAGCA |
| fwd_sgRNA_T7_dsDNA_CTNNB1_T41A | TAATACGACTCACTATAGGCTGTGGCAGTGGCACCAGAAGTTTTAGAGCTAGAAATAGCA |
| fwd_sgRNA_T7_dsDNA_HRAS_Q61R | TAATACGACTCACTATAGGCCTCCCGGCCGGCGGTATCCGTTTTAGAGCTAGAAATAGCA |
| fwd_sgRNA_T7_dsDNA_53_Y163C | TAATACGACTCACTATAGGGCTTGCAGATGGCCATGGCGGTTTTAGAGCTAGAAATAGCA |
| fwd_sgRNA_T7_dsDNA_53_Y236C | TAATACGACTCACTATAGGACACATGCAGTTGTAGTGGAGTTTTAGAGCTAGAAATAGCA |
| fwd_sgRNA_T7_dsDNA_53_N239D | TAATACGACTCACTATAGGTGTCACACATGTAGTTGTAGGTTTTAGAGCTAGAAATAGCA |

[0492] Sequences of 80-Nucleotide Unlabeled Strands and Cy3-Labeled Universal Primer Used in Gel-Based dsDNA Deaminase Assays.

[0493] SEQ ID NOs: 224-248 appear from top to bottom below, respectively.

| | |
|---|---|
| Cy3-primer | Cy3-GTAGGTAGTTAGGATGAATGGAAGGTTGGTA |
| dsDNA_2 | GTCCATGGATCCAGAGGTCATCCATTAAATAAATAAATCCGCGGGGCTATACCAACCTTCCATTCATCCTAACTACCTAC |
| dsDNA_3 | GTCCATGGATCCAGAGGTCATCCATAAATAAATAAATCCGCGGAAGCTATACCAACCTTCCATTCATCCTAACTACCTAC |
| dsDNA_4 | GTCCATGGATCCAGAGGTCATCCATAATAAATAAATCCGCGGAAGGCTATACCAACCTTCCATTCATCCTAACTACCTAC |
| dsDNA_5 | GTCCATGGATCCAGAGGTCATCCAAATAAATAAATCCGCGGAATGGCTATACCAACCTTCCATTCATCCTAACTACCTAC |
| dsDNA_6 | GTCCATGGATCCAGAGGTCATCCAATAAATAAATCCGCGGAATAGGCTATACCAACCTTCCATTCATCCTAACTACCTAC |
| dsDNA_7 | GTCCATGGATCCAGAGGTCATCCATAAATAAATCCGCGGAATAAGGCTATACCAACCTTCCATTCATCCTAACTACCTAC |
| dsDNA_8 | GTCCATGGATCCAGAGGTCATCCAAAATAAATCCGCGGAATAATGGCTATACCAACCTTCCATTCATCCTAACTACCTAC |
| dsDNA_9 | GTCCATGGATCCAGAGGTCATCCAAATAAATCCGCGGAATAATAGGCTATACCAACCTTCCATTCATCCTAACTACCTAC |
| dsDNA_10 | GTCCATGGATCCAGAGGTCATCCAATAAATCCGCGGATAATAATGGCTATACCAACCTTCCATTCATCCTAACTACCTAC |
| dsDNA_11 | GTCCATGGATCCAGAGGTCATCCATAAATCCGCGGAATATAATAGGCTATACCAACCTTCCATTCATCCTAACTACCTAC |
| dsDNA_12 | GTCCATGGATCCAGAGGTCATCCAAAATCCGCGGAATATAATAAGGCTATACCAACCTTCCATTCATCCTAACTACCTAC |
| dsDNA_13 | GTCCATGGATCCAGAGGTCATCCAAATCCGCGGAATATAATAATGGCTATACCAACCTTCCATTCATCCTAACTACCTAC |
| dsDNA_14 | GTCCATGGATCCAGAGGTCATCCAATCCGCGGAATATAATAATAGGCTATACCAACCTTCCATTCATCCTAACTACCTAC |
| dsDNA_15 | GTCCATGGATCCAGAGGTCATCCATCCGCGGTAATAATAATAATGGCTATACCAACCTTCCATTCATCCTAACTACCTAC |
| dsDNA_18 | GTCCATGGATCCAGAGGTCATCCAGCGGTAATAATAATAATAATGGCTATACCAACCTTCCATTCATCCTAACTACCTAC |
| dsDNA_noC | GTCCATGGATCCAGAGGTCATCCATTAAATAAATAAATTAATATTACTATACCAACCTTCCATTCATCCTAACTACCTAC |
| dsDNA_8U | 5Cy3-GTAGGTAGTTAGGATGAATGGAAGGTTGGTGTAGATTATTATCUGCGGATTTATTGGATGACCTCTGGATCCATGGACAT |
| dsDNA_APOE_C112R | GCACCTCGCCGCGGTACTGCACCAGGCGGCCGCGCACGTCCTCCATGTCTACCAACCTTCCATTCATCCTAACTACCTAC |
| dsDNA_APOE_C158R | CGGCGCCCTCGCGGGCCCCGGCCTGGTACACTGCCAGGCGCTTCTGCAGTACCAACCTTCCATTCATCCTAACTACCTAC |
| dsDNA_CTNNB1_T41A | GTCTTACCTGGACTCTGGAATCCATTCTGGTGCCACTGCCACAGCTCCTTACCAACCTTCCATTCATCCTAACTACCTAC |
| dsDNA_HRAS_Q61R | GGAGACGTGCCTGTTGGACATCCTGGATACCGCCGGCCGGGAGGAGTACTACCAACCTTCCATTCATCCTAACTACCTAC |
| dsDNA_p53_Y163C | ACCCCCGCCCGGCACCCGCGTCCGCGCCATGGCCATCTGCAAGCAGTCATACCAACCTTCCATTCATCCTAACTACCTAC |
| dsDNA_p53_Y236C | AGGTTGGCTCTGACTGTACCACCATCCACTACAACTGCATGTGTAACAGTACCAACCTTCCATTCATCCTAACTACCTAC |
| dsDNA_p53_N239D | TGGCTCTGACTGTACCACCATCCACTACAACTACATGTGTGACAGTTCCTACCAACCTTCCATTCATCCTAACTACCTAC |

[0494] Primers Used for Generating PCR Products to Serve as Substrates for T7 Transcription of sgRNAs for High-Throughput Sequencing.

[0495] rev_gRNA_T7 (above) was used in all cases. The pFYF1320 plasmid was used as template as noted in Materials and Methods section. SEQ ID NOs: 249-300 appear from top to bottom below, respectively.

| | |
|---|---|
| fwd_sgRNA_T7_HTS_base | TAATACGACTCACTATAGGTTATTTCGTGGATTTATTTAGTTTTAGAGCTAGAAATAGCA |
| fwd_sgRNA_T7_HTS_1A | TAATACGACTCACTATAGGATATTTCGTGGATTTATTTAGTTTTAGAGCTAGAAATAGCA |
| fwd_sgRNA_T7_HTS_1C | TAATACGACTCACTATAGGCTATTTCGTGGATTTATTTAGTTTTAGAGCTAGAAATAGCA |
| fwd_sgRNA_T7_HTS_1G | TAATACGACTCACTATAGGGTATTTCGTGGATTTATTTAGTTTTAGAGCTAGAAATAGCA |
| Fwd_sgRNA_T7_HTS_2A | TAATACGACTCACTATAGGTAATTTCGTGGATTTATTTAGTTTTAGAGCTAGAAATAGCA |
| fwd_sgRNA_T7_HTS_2C | TAATACGACTCACTATAGGTCATTTCGTGGATTTATTTAGTTTTAGAGCTAGAAATAGCA |
| fwd_sgRNA_T7_HTS_2G | TAATACGACTCACTATAGGTGATTTCGTGGATTTATTTAGTTTTAGAGCTAGAAATAGCA |
| fwd_sgRNA_T7_HTS_3T | TAATACGACTCACTATAGGTTTTTTCGTGGATTTATTTAGTTTTAGAGCTAGAAATAGCA |
| fwd_sgRNA_T7_HTS_3C | TAATACGACTCACTATAGGTTCTTTCGTGGATTTATTTAGTTTTAGAGCTAGAAATAGCA |
| fwd_sgRNA_T7_HTS_3G | TAATACGACTCACTATAGGTTGTTTCGTGGATTTATTTAGTTTTAGAGCTAGAAATAGCA |
| fwd_sgRNA_T7_HTS_4A | TAATACGACTCACTATAGGTTAATTCGTGGATTTATTTAGTTTTAGAGCTAGAAATAGCA |
| fwd_sgRNA_T7_HTS_4C | TAATACGACTCACTATAGGTTACTTCGTGGATTTATTTAGTTTTAGAGCTAGAAATAGCA |
| fwd_sgRNA_T7_HTS_4G | TAATACGACTCACTATAGGTTAGTTCGTGGATTTATTTAGTTTTAGAGCTAGAAATAGCA |
| fwd_sgRNA_T7_HTS_5A | TAATACGACTCACTATAGGTTATATCGTGGATTTATTTAGTTTTAGAGCTAGAAATAGCA |
| fwd_sgRNA_T7_HTS_5C | TAATACGACTCACTATAGGTTATCTCGTGGATTTATTTAGTTTTAGAGCTAGAAATAGCA |
| fwd_sgRNA_T7_HTS_5G | TAATACGACTCACTATAGGTTATGTCGTGGATTTATTTAGTTTTAGAGCTAGAAATAGCA |
| fwd_sgRNA_T7_HTS_6A | TAATACGACTCACTATAGGTTATTACGTGGATTTATTTAGTTTTAGAGCTAGAAATAGCA |
| fwd_sgRNA_T7_HTS_6C | TAATACGACTCACTATAGGTTATTCCGTGGATTTATTTAGTTTTAGAGCTAGAAATAGCA |
| fwd_sgRNA_T7_HTS_6G | TAATACGACTCACTATAGGTTATTGCGTGGATTTATTTAGTTTTAGAGCTAGAAATAGCA |
| fwd_sgRNA_T7_HTS_8A | TAATACGACTCACTATAGGTTATTTCATGGATTTATTTAGTTTTAGAGCTAGAAATAGCA |
| fwd_sgRNA_T7_HTS_8T | TAATACGACTCACTATAGGTTATTTCTTGGATTTATTTAGTTTTAGAGCTAGAAATAGCA |
| fwd_sgRNA_T7_HTS_8C | TAATACGACTCACTATAGGTTATTTCCTGGATTTATTTAGTTTTAGAGCTAGAAATAGCA |
| fwd_sgRNA_T7_HTS_9A | TAATACGACTCACTATAGGTTATTTCGAGGATTTATTTAGTTTTAGAGCTAGAAATAGCA |
| fwd_sgRNA_T7_HTS_9C | TAATACGACTCACTATAGGTTATTTCGCGGATTTATTTAGTTTTAGAGCTAGAAATAGCA |
| fwd_sgRNA_T7_HTS_9G | TAATACGACTCACTATAGGTTATTTCGGGGATTTATTTAGTTTTAGAGCTAGAAATAGCA |
| fwd_sgRNA_T7_HTS_10A | TAATACGACTCACTATAGGTTATTTCGTAGATTTATTTAGTTTTAGAGCTAGAAATAGCA |
| fwd_sgRNA_T7_HTS_10T | TAATACGACTCACTATAGGTTATTTCGTTGATTTATTTAGTTTTAGAGCTAGAAATAGCA |
| fwd_sgRNA_T7_HTS_10C | TAATACGACTCACTATAGGTTATTTCGTCGATTTATTTAGTTTTAGAGCTAGAAATAGCA |
| fwd_sgRNA_T7_HTS_11A | TAATACGACTCACTATAGGTTATTTCGTGAATTTATTTAGTTTTAGAGCTAGAAATAGCA |
| fwd_sgRNA_T7_HTS_11T | TAATACGACTCACTATAGGTTATTTCGTGTATTTATTTAGTTTTAGAGCTAGAAATAGCA |
| fwd_sgRNA_T7_HTS_11C | TAATACGACTCACTATAGGTTATTTCGTGCATTTATTTAGTTTTAGAGCTAGAAATAGCA |
| fwd_sgRNA_T7_HTS_12T | TAATACGACTCACTATAGGTTATTTCGTGGTTTTATTTAGTTTTAGAGCTAGAAATAGCA |
| fwd_sgRNA_T7_HTS_12C | TAATACGACTCACTATAGGTTATTTCGTGGCTTTATTTAGTTTTAGAGCTAGAAATAGCA |
| fwd_sgRNA_T7_HTS_12G | TAATACGACTCACTATAGGTTATTTCGTGGGTTTATTTAGTTTTAGAGCTAGAAATAGCA |
| fwd_sgRNA_T7_HTS_13A | TAATACGACTCACTATAGGTTATTTCGTGGAATTATTTAGTTTTAGAGCTAGAAATAGCA |
| fwd_sgRNA_T7_HTS_13C | TAATACGACTCACTATAGGTTATTTCGTGGACTTATTTAGTTTTAGAGCTAGAAATAGCA |
| fwd_sgRNA_T7_HTS_13G | TAATACGACTCACTATAGGTTATTTCGTGGAGTTATTTAGTTTTAGAGCTAGAAATAGCA |
| fwd_sgRNA_T7_HTS_muitiC | TAATACGACTCACTATAGGTTCCCCCCCCGATTTATTTAGTTTTAGAGCTAGAAATAGCA |
| fwd_sgRNA_T7_HTS_TCGCACCC_odd | TAATACGACTCACTATAGGCGCACCCGTGGATTTATTTAGTTTTAGAGCTAGAAATAGCA |
| fwd_sgRNA_T7_HTS_CCTCGCAC_odd | TAATACGACTCACTATAGGCTCGCACGTGGATTTATTTAGTTTTAGAGCTAGAAATAGCA |
| fwd_sgRNA_T7_HTS_ACCCTCGC_odd | TAATACGACTCACTATAGGCCCTCGCGTGGATTTATTTAGTTTTAGAGCTAGAAATAGCA |
| fwd_sgRNA_T7_HTS_GCACCCTC_odd | TAATACGACTCACTATAGGCACCCTCGTGGATTTATTTAGTTTTAGAGCTAGAAATAGCA |
| fwd_sgRNA_T7_HTS_TCGCACCC_even | TAATACGACTCACTATAGGTCGCACCCGTGGATTTATTAGTTTTAGAGCTAGAAATAGCA |
| fwd_sgRNA_T7_HTS_CCTCGCAC_even | TAATACGACTCACTATAGGCCTCGCACGTGGATTTATTAGTTTTAGAGCTAGAAATAGCA |
| fwd_sgRNA_T7_HTS_ACCCTCGC_even | TAATACGACTCACTATAGGACCCTCGCGTGGATTTATTAGTTTTAGAGCTAGAAATAGCA |
| fwd_sgRNA_T7_HTS_GCACCCTC_even | TAATACGACTCACTATAGGGCACCCTCGTGGATTTATTAGTTTTAGAGCTAGAAATAGCA |
| fwd_sgRNA_T7_HTS_EMX1 | TAATACGACTCACTATAGGGAGTCCGAGCAGAAGAAGAAGTTTTAGAGCTAGAAATAGCA |
| fwd_sgRNA_T7_HTS_FANCF | TAATACGACTCACTATAGGGGAATCCCTTCTGCAGCACCGTTTTAGAGCTAGAAATAGCA |
| fwd_sgRNA_T7_HTS_HEK293_site2 | TAATACGACTCACTATAGGGAACACAAAGCATAGACTGCGTTTTAGAGCTAGAAATAGCA |
| fwd_sgRNA_T7_HTS_HEK293_site3 | TAATACGACTCACTATAGGGGCCCAGACTGAGCACGTGAGTTTTAGAGCTAGAAATAGCA |
| fwd_sgRNA_T7_HTS_HEK293_site4 | TAATACGACTCACTATAGGGGCACTGCGGCTGGAGGTGGGTTTTAGAGCTAGAAATAGCA |
| fwd_sgRNA_T7_HTS_RNF2 | TAATACGACTCACTATAGGGTCATCTTAGTCATTACCTGGTTTTAGAGCTAGAAATAGCA |

[0496] Sequences of In Vitro-Edited dsDNA for High-Throughput Sequencing (HTS).

[0497] Shown are the sequences of edited strands. Reverse complements of all sequences shown were also obtained. dsDNA substrates were obtained by annealing complementary strands as described in Materials and Methods. Oligonucleotides representing the EMX1, FANCF, HEK293 site 2, HEK293 site 3, HEK293 site 4, and RNF2 loci were originally designed for use in the gel-based deaminase assay and therefore have the same 25-nt sequence on their 5′-ends (matching that of the Cy3-primer). SEQ ID NOs: 301-352 appear from top to bottom below, respectively.

| | |
|---|---|
| Base sequence | ACGTAAACGGCCACAAGTTCTTATTTCGTGGATTTATTTATGGCATCTTCTTCAAGGACG |
| 1A | ACGTAAACGGCCACAAGTTCATATTTCGTGGATTTATTTATGGCATCTTCTTCAAGGACG |
| 1C | ACGTAAACGGCCACAAGTTCCTATTTCGTGGATTTATTTATGGCATCTTCTTCAAGGACG |
| 1G | ACGTAAACGGCCACAAGTTCGTATTTCGTGGATTTATTTATGGCATCTTCTTCAAGGACG |
| 2A | ACGTAAACGGCCACAAGTTCTAATTTCGTGGATTTATTTATGGCATCTTCTTCAAGGACG |
| 2C | ACGTAAACGGCCACAAGTTCTCATTTCGTGGATTTATTTATGGCATCTTCTTCAAGGACG |
| 2G | ACGTAAACGGCCACAAGTTCTGATTTCGTGGATTTATTTATGGCATCTTCTTCAAGGACG |
| 3T | ACGTAAACGGCCACAAGTTCTTTTTTCGTGGATTTATTTATGGCATCTTCTTCAAGGACG |
| 3C | ACGTAAACGGCCACAAGTTCTTCTTTCGTGGATTTATTTATGGCATCTTCTTCAAGGACG |
| 3G | ACGTAAACGGCCACAAGTTCTTGTTTCGTGGATTTATTTATGGCATCTTCTTCAAGGACG |
| 4A | ACGTAAACGGCCACAAGTTCTTAATTCGTGGATTTATTTATGGCATCTTCTTCAAGGACG |
| 4C | ACGTAAACGGCCACAAGTTCTTACTTCGTGGATTTATTTATGGCATCTTCTTCAAGGACG |
| 4G | ACGTAAACGGCCACAAGTTCTTAGTTCGTGGATTTATTTATGGCATCTTCTTCAAGGACG |
| 5A | ACGTAAACGGCCACAAGTTCTTATATCGTGGATTTATTTATGGCATCTTCTTCAAGGACG |
| 5C | ACGTAAACGGCCACAAGTTCTTATCTCGTGGATTTATTTATGGCATCTTCTTCAAGGACG |
| 5G | ACGTAAACGGCCACAAGTTCTTATGTCGTGGATTTATTTATGGCATCTTCTTCAAGGACG |
| 6A | ACGTAAACGGCCACAAGTTCTTATTACGTGGATTTATTTATGGCATCTTCTTCAAGGACG |
| 6C | ACGTAAACGGCCACAAGTTCTTATTCCGTGGATTTATTTATGGCATCTTCTTCAAGGACG |
| 6G | ACGTAAACGGCCACAAGTTCTTATTGCGTGGATTTATTTATGGCATCTTCTTCAAGGACG |
| 8A | ACGTAAACGGCCACAAGTTCTTATTTCATGGATTTATTTATGGCATCTTCTTCAAGGACG |
| 8T | ACGTAAACGGCCACAAGTTCTTATTTCTTGGATTTATTTATGGCATCTTCTTCAAGGACG |
| 8C | ACGTAAACGGCCACAAGTTCTTATTTCCTGGATTTATTTATGGCATCTTCTTCAAGGACG |
| 9A | ACGTAAACGGCCACAAGTTCTTATTTCGAGGATTTATTTATGGCATCTTCTTCAAGGACG |
| 9C | ACGTAAACGGCCACAAGTTCTTATTTCGCGGATTTATTTATGGCATCTTCTTCAAGGACG |
| 9G | ACGTAAACGGCCACAAGTTCTTATTTCGGGGATTTATTTATGGCATCTTCTTCAAGGACG |
| 10A | ACGTAAACGGCCACAAGTTCTTATTTCGTAGATTTATTTATGGCATCTTCTTCAAGGACG |
| 10T | ACGTAAACGGCCACAAGTTCTTATTTCGTTGATTTATTTATGGCATCTTCTTCAAGGACG |
| 10C | ACGTAAACGGCCACAAGTTCTTATTTCGTCGATTTATTTATGGCATCTTCTTCAAGGACG |
| 11A | ACGTAAACGGCCACAAGTTCTTATTTCGTGAATTTATTTATGGCATCTTCTTCAAGGACG |
| 11T | ACGTAAACGGCCACAAGTTCTTATTTCGTGTATTTATTTATGGCATCTTCTTCAAGGACG |
| 11C | ACGTAAACGGCCACAAGTTCTTATTTCGTGCATTTATTTATGGCATCTTCTTCAAGGACG |
| 12T | ACGTAAACGGCCACAAGTTCTTATTTCGTGGTTTTATTTATGGCATCTTCTTCAAGGACG |
| 12C | ACGTAAACGGCCACAAGTTCTTATTTCGTGGCTTTATTTATGGCATCTTCTTCAAGGACG |
| 12G | ACGTAAACGGCCACAAGTTCTTATTTCGTGGGTTTATTTATGGCATCTTCTTCAAGGACG |
| 13A | ACGTAAACGGCCACAAGTTCTTATTTCGTGGAATTATTTATGGCATCTTCTTCAAGGACG |
| 13C | ACGTAAACGGCCACAAGTTCTTATTTCGTGGACTTATTTATGGCATCTTCTTCAAGGACG |
| 13G | ACGTAAACGGCCACAAGTTCTTATTTCGTGGAGTTATTTATGGCATCTTCTTCAAGGACG |
| multiC | ACGTAAACGGCCACAAGTTCTTCCCCCCCCGATTTATTTATGGCATCTTCTTCAAGGACG |
| TCGCACCC_odd | ACGTAAACGGCCACAAGTTTCGCACCCGTGGATTTATTTATGGCATCTTCTTCAAGGACG |
| CCTCGCAC_odd | ACGTAAACGGCCACAAGTTCCTCGCACGTGGATTTATTTATGGCATCTTCTTCAAGGACG |
| ACCCTCGC_odd | ACGTAAACGGCCACAAGTTACCCTCGCGTGGATTTATTTATGGCATCTTCTTCAAGGACG |
| GCACCCTC_odd | ACGTAAACGGCCACAAGTTGCACCCTCGTGGATTTATTTATGGCATCTTCTTCAAGGACG |
| TCGCACCC_even | ACGTAAACGGCCACAAGTATTCGCACCCGTGGATTTATTATGGCATCTTCTTCAAGGACG |
| CCTCGCAC_even | ACGTAAACGGCCACAAGTATCCTCGCACGTGGATTTATTATGGCATCTTCTTCAAGGACG |
| ACCCTCGC_even | ACGTAAACGGCCACAAGTATACCCTCGCGTGGATTTATTATGGCATCTTCTTCAAGGACG |
| GCACCCTC_even | ACGTAAACGGCCACAAGTATGCACCCTCGTGGATTTATTATGGCATCTTCTTCAAGGACG |
| EMX1_invitro | GTAGGTAGTTAGGATGAATGGAAGGTTGGTAGGCCTGAGTCCGAGCAGAAGAAGAAGGGCTCCCATCACATCAACCGGTG |
| FANCF_invitro | GTAGGTAGTTAGGATGAATGGAAGGTTGGTACTCATGGAATCCCTTCTGCAGCACCTGGATCGCTTTTCCGAGCTTCTGG |
| HEK293_site2_invitro | GTAGGTAGTTAGGATGAATGGAAGGTTGGTAAACTGGAACACAAAGCATAGACTGCGGGGCGGGCCAGCCTGAATAGCTG |
| HEK293_site3_invitro | GTAGGTAGTTAGGATGAATGGAAGGTTGGTACTTGGGGCCCAGACTGAGCACGTGATGGCAGAGGAAAGGAAGCCCTGCT |
| HEK293_site4_invitro | GTAGGTAGTTAGGATGAATGGAAGGTTGGTACCGGTGGCACTGCGGCTGGAGGTGGGGGTTTAAGCGGAGACTCTGGTGC |
| RNF2_invitro | GTAGGTAGTTAGGATGAATGGAAGGTTGGTATGGCAGTCATCTTAGTCATTACCTGAGGTGTTCGTTGTAACTCATATAA |

[0498] Primers for HTS of In Vitro Edited dsDNA.

[0499] SEQ ID NOs: 353-361 appear from top to bottom below, respectively.

| | |
|---|---|
| fwd_invitro_HTS | ACACTCTTTCCCTACACGACGCTCTTCCGATCTNNNNACGTAAACGGCCACAA |
| rev_invitro_HTS | TGGAGTTCAGACGTGTGCTCTTCCGATCTCGTCCTTGAAGAAGATGC |
| fwd_invitro_HEK_targets | ACACTCTTTCCCTACACGACGCTCTTCCGATCTNNNNGTAGGTAGTTAGGATGAATGGAA |
| rev_EMX1_invitro | TGGAGTTCAGACGTGTGCTCTTCCGATCTCACCGGTTGATGTGATGG |
| rev_FANCF_invitro | TGGAGTTCAGACGTGTGCTCTTCCGATCTCCAGAAGCTCGGAAAAGC |
| rev_HEK293_site2_invitro | TGGAGTTCAGACGTGTGCTCTTCCGATCTCAGCTATTCAGGCTGGC |
| rev_HEK293_site3_invitro | TGGAGTTCAGACGTGTGCTCTTCCGATCTAGCAGGGCTTCCTTTC |
| rev_HEK293_site4_invitro | TGGAGTTCAGACGTGTGCTCTTCCGATCTGCACCAGAGTCTCCG |
| rev_RNF2_invitro | TGGAGTTCAGACGTGTGCTCTTCCGATCTTTATATGAGTTACAACGAACACC |

[0500] Primers for HTS of On-Target and Off-Target Sites from all Mammalian Cell Culture Experiments.

[0501] SEQ ID NOs: 362-469 appear from top to bottom below, respectively.

| | |
|---|---|
| fwd_EMX1_HTS | ACACTCTTTCCCTACACGACGCTCTTCCGATCTNNNNCAGCTCAGCCTGAGTGTTGA |
| rev_EMX1_HTS | TGGAGTTCAGACGTGTGCTCTTCCGATCTCTCGTGGGTTTGTGGTTGC |
| fwd_FANCF_HTS | ACACTCTTTCCCTACACGACGCTCTTCCGATCTNNNNCATTGCAGAGAGGCGTATCA |
| rev_FANCF_HTS | TGGAGTTCAGACGTGTGCTCTTCCGATCTGGGGTCCCAGGTGCTGAC |
| fwd_HEK293_site2_HTS | ACACTCTTTCCCTACACGACGCTCTTCCGATCTNNNNCCAGCCCCATCTGTCAAACT |
| rev_HEK293_site2_HTS | TGGAGTTCAGACGTGTGCTCTTCCGATCTTGAATGGATTCCTTGGAAACAATGA |
| fwd_HEK293_site3_HTS | ACACTCTTTCCCTACACGACGCTCTTCCGATCTNNNNATGTGGGCTGCCTAGAAAGG |
| rev_HEK293_site3_HTS | TGGAGTTCAGACGTGTGCTCTTCCGATCTCCCAGCCAAACTTGTCAACC |
| fwd_HEK293_site4_HTS | ACACTCTTTCCCTACACGACGCTCTTCCGATCTNNNNGAACCCAGGTAGCCAGAGAC |
| rev_HEK293_site4_HTS | TGGAGTTCAGACGTGTGCTCTTCCGATCTTCCTTTCAACCCGAACGGAG |
| fwd_RNF2_HTS | ACACTCTTTCCCTACACGACGCTCTTCCGATCTNNNNCTCTTCTTTATTTCCAGCAATGT |
| rev_RNF2_HTS | TGGAGTTCAGACGTGTGCTCTTCCGATCTGTTTTCATGTTCTAAAAATGTATCCCA |
| fwd_p53_Y163C_HTS | ACACTCTTTCCCTACACGACGCTCTTCCGATCTNNNNTACAGTACTCCCCTGCCCTC |
| rev_p53_Y163C_HTS | TGGAGTTCAGACGTGTGCTCTTCCGATCTGCTGCTCACCATCGCTATCT |
| fwd_p53_N239D_HTS | ACACTCTTTCCCTACACGACGCTCTTCCGATCTNNNNCCTCATCTTGGGCCTGTGTT |
| rev_p53_N239D_HTS | TGGAGTTCAGACGTGTGCTCTTCCGATCTAAATCGGTAAGAGGTGGGCC |
| fwd_APOE4_C158R_HTS | ACACTCTTTCCCTACACGACGCTCTTCCGATCTNNNNGCGGACATGGAGGACGTG |
| rev_APOE4_C158R_HTS | TGGAGTTCAGACGTGTGCTCTTCCGATCTCTGTTCCACCAGGGGCCC |
| fwd_EMX1_off1_HTS | ACACTCTTTCCCTACACGACGCTCTTCCGATCTNNNNTGCCCAATCATTGATGCTTTT |
| rev_EMX1_off1_HTS | TGGAGTTCAGACGTGTGCTCTTCCGATCTAGAAACATTTACCATAGACTATCACCT |
| fwd_EMX1_off2_HTS | ACACTCTTTCCCTACACGACGCTCTTCCGATCTNNNNAGTAGCCTCTTTCTCAATGTGC |
| rev_EMX1_off2_HTS | TGGAGTTCAGACGTGTGCTCTTCCGATCTGCTTTCACAAGGATGCAGTCT |
| fwd_EMX1_off3_HTS | ACACTCTTTCCCTACACGACGCTCTTCCGATCTNNNNGAGCTAGACTCCGAGGGGA |
| rev_EMX1_off3_HTS | TGGAGTTCAGACGTGTGCTCTTCCGATCTTCCTCGTCCTGCTCTCACTT |
| fwd_EMX1_off4_HTS | ACACTCTTTCCCTACACGACGCTCTTCCGATCTNNNNAGAGGCTGAAGAGGAAGACCA |
| rev_EMX1_off4_HTS | TGGAGTTCAGACGTGTGCTCTTCCGATCTGGCCCAGCTGTGCATTCTAT |
| fwd_EMX1_off6_HTS | ACACTCTTTCCCTACACGACGCTCTTCCGATCTNNNNCCAAGAGGGCCAAGTCCTG |
| rev_EMX1_off6_HTS | TGGAGTTCAGACGTGTGCTCTTCCGATCTCAGCGAGGAGTGACAGCC |
| fwd_EMX1_off7_HTS | ACACTCTTTCCCTACACGACGCTCTTCCGATCTNNNNCACTCCACCTGATCTCGGGG |
| rev_EMX1_off7_HTS | TGGAGTTCAGACGTGTGCTCTTCCGATCTCGAGGAGGGAGGGAGCAG |
| fwd_EMX1_off8_HTS | ACACTCTTTCCCTACACGACGCTCTTCCGATCTNNNNACCACAAATGCCCAAGAGAC |
| rev_EMX1_off8_HTS | TGGAGTTCAGACGTGTGCTCTTCCGATCTGACACAGTCAAGGGCCGG |
| fwd_EMX1_off9_HTS | ACACTCTTTCCCTACACGACGCTCTTCCGATCTNNNNCCCACCTTTGAGGAGGCAAA |
| rev_EMX1_off9_HTS | TGGAGTTCAGACGTGTGCTCTTCCGATCTTTCCATCTGAGAAGAGAGTGGT |
| fwd_EMX1_off10_HTS | ACACTCTTTCCCTACACGACGCTCTTCCGATCTNNNNGTCATACCTTGGCCCTTCCT |
| rev_EMX1_off10_HTS | TGGAGTTCAGACGTGTGCTCTTCCGATCTTCCCTAGGCCCACACCAG |
| fwd_FANCF_off1_HTS | ACACTCTTTCCCTACACGACGCTCTTCCGATCTNNNNAACCCACTGAAGAAGCAGGG |
| rev_FANCF_off1_HTS | TGGAGTTCAGACGTGTGCTCTTCCGATCTGGTGCTTAATCCGGCTCCAT |
| fwd_FANCF_off2_HTS | ACACTCTTTCCCTACACGACGCTCTTCCGATCTNNNNTCCAGTGTTTCCATCCCGAA |
| rev_FANCF_off2_HTS | TGGAGTTCAGACGTGTGCTCTTCCGATCTCCTCTGACCTCCACAACTCT |
| fwd_FANCF_off3_HTS | ACACTCTTTCCCTACACGACGCTCTTCCGATCTTTNNNNCTGGGTACAGTTCTGCGTGT |
| rev_FANCF_off3_HTS | TGGAGTTCAGACGTGTGCTCTTCCGATCTTCACTCTGAGCATCGCCAAG |
| fwd_FANCF_off4_HTS | ACACTCTTTCCCTACACGACGCTCTTCCGATCTNNNNGGTTTAGAGCCAGTGAACTAGAG |
| rev_FANCF_off4_HTS | TGGAGTTCAGACGTGTGCTCTTCCGATCTGCAAGACAAAATCCTCTTTATACTTTG |
| fwd_FANCF_off5_HTS | ACACTCTTTCCCTACACGACGCTCTTCCGATCTNNNNGGGAGGGGACGGCCTTAC |
| rev_FANCF_off5_HTS | TGGAGTTCAGACGTGTGCTCTTCCGATCTGCCTCTGGCGAACATGGC |
| fwd_FANCF_off6_HTS | ACACTCTTTCCCTACACGACGCTCTTCCGATCTNNNNTCCTGGTTAAGAGCATGGGC |
| rev_FANCF_off6_HTS | TGGAGTTCAGACGTGTGCTCTTCCGATCTGATTGAGTCCCCACAGCACA |
| fwd_FANCF_off7_HTS | ACACTCTTTCCCTACACGACGCTCTTCCGATCTNNNNCCAGTGTTTCCCATCCCCAA |
| rev_FANCF_off7_HTS | TGGAGTTCAGACGTGTGCTCTTCCGATCTTGACCTCCACAACTGGAAAAT |
| fwd_FANCF_off8_HTS | ACACTCTTTCCCTACACGACGCTCTTCCGATCTNNNNGCTTCCAGACCCACCTGAAG |
| rev_FANCF_off8_HTS | TGGAGTTCAGACGTGTGCTCTTCCGATCTACCGAGGAAAATTGCTTGTCG |
| fwd_HEK293_site2_off1_HTS | ACACTCTTTCCCTACACGACGCTCTTCCGATCTNNNNGTGTGGAGAGTGAGTAAGCCA |
| rev_HEK293_site2_off1_HTS | TGGAGTTCAGACGTGTGCTCTTCCGATCTACGGTAGGATGATTTCAGGCA |
| fwd_HEK293_site2_off2_HTS | ACACTCTTTCCCTACACGACgCTCTTCCGATCTNNNNCACAAAGCAGTGTAGCTCAGG |
| rev_HEK293_site2_off2_HTS | TGGAGTTCAGACGTGTGCTCTTCCGATCTTTTTTGGTACTCGAGTGTTATTCAG |
| fwd_HEK293_site3_off1_HTS | ACACTCTTTCCCTACACGACGCTCTTCCGATCTNNNNTCCCCTGTTGACCTGGAGAA |
| rev_HEK293_site3_off1_HTS | TGGAGTTCAGACGTGTGCTCTTCCGATCTCACTGTACTTGCCCTGACCA |
| fwd_HEK293_site3_off2_HTS | ACACTCTTTCCCTACACGACGCTCTTCCGATCTNNNNTTGGTGTTGACAGGGAGCAA |
| rev_HEK293_site3_off2_HTS | TGGAGTTCAGACGTGTGCTCTTCCGATCTCTGAGATGTGGGCAGAAGGG |
| fwd_HEK293_site3_off3_HTS | ACACTCTTTCCCTACACGACGCTCTTCCGATCTNNNNTGAGAGGGAACAGAAGGGCT |
| rev_HEK293_site3_off3_HTS | TGGAGTTCAGACGTGTGCTCTTCCGATCTGTCCAAAGGCCCAAGAACCT |
| fwd_HEK293_site3_off4_HTS | ACACTCTTTCCCTACACGACGCTCTTCCGATCTNNNNTCCTAGCACTTTGGAAGGTCG |
| rev_HEK293_site3_off4_HTS | TGGAGTTCAGACGTGTGCTCTTCCGATCTGCTCATCTTAATCTGCTCAGCC |
| fwd_HEK293_site3_off5_HTS | ACACTCTTTCCCTACACGACGCTCTTCCGATCTNNNNAAAGGAGCAGCTCTTCCTGG |
| rev_HEK293_site3_off5_HTS | TGGAGTTCAGACGTGTGCTCTTCCGATCTGTCTGCACCATCTCCCACAA |
| fwd_HEK293_site4_off1_HTS | ACACTCTTTCCCTACACGACGCTCTTCCGATCTNNNNGGCATGGCTTCTGAGACTCA |
| rev_HEK293_site4_off1_HTS | TGGAGTTCAGACGTGTGCTCTTCCGATCTGTCTCCCTTGCACTCCCTGTCTTT |
| fwd_HEK293_site4_off2_HTS | ACACTCTTTCCCTACACGACGCTCTTCCGATCTNNNNTTTGGCAATGGAGGCATTGG |
| rev_HEK293_site4_off2_HTS | TGGAGTTCAGACGTGTGCTCTTCCGATCTGAAGAGGCTGCCCATGAGAG |
| fwd_HEK293_site4_off3_HTS | ACACTCTTTCCCTACACGACGCTCTTCCGATCTNNNNGGTCTGAGGCTCGAATCCTG |
| rev_HEK293_site4_off3_HTS | TGGAGTTCAGACGTGTGCTCTTCCGATCTCTGTGGCCTCCATATCCCTG |
| fwd_HEK293_site4_off4_HTS | ACACTCTTTCCCTACACGACGCTCTTCCGATCTNNNNTTTCCACCAGAACTCAGCCC |
| rev_HEK293_site4_off4_HTS | TGGAGTTCAGACGTGTGCTCTTCCGATCTCCTCGGTTCCTCCACAACAC |
| fwd_HEK293_site4_off5_HTS | ACACTCTTTCCCTACACGACGCTCTTCCGATCTNNNNCACGGGAAGGACAGGAGAAC |
| rev_HEK293_site4_off5_HTS | TGGAGTTCAGACGTGTGCTCTTCCGATCTGCAGGGGAGGGATAAAGCAG |
| fwd_HEK293_site4_off6_HTS | ACACTCTTTCCCTACACGACGCTCTTCCGATCTNNNNCCACGGGAGATGGCTTATGT |
| rev_HEK293_site4_off6_HTS | TGGAGTTCAGACGTGTGCTCTTCCGATCTCACATCCTCACTGTGCCACT |
| fwd_HEK293_site4_off7_HTS | ACACTCTTTCCCTACACGACGCTCTTCCGATCTNNNNGTCAGTCTCGGCCCCTCA |
| rev_HEK293_site4_off7_HTS | TGGAGTTCAGACGTGTGCTCTTCCGATCTGCCACTGTAAAGCTCTTGGG |
| fwd_HEK293_site4_off8_HTS | ACACTCTTTCCCTACACGACGCTCTTCCGATCTNNNNAGGGTAGAGGGACAGAGCTG |
| rev_HEK293_site4_off8_HTS | TGgAGTTCAGACGTGTGCTCTTCCGATCTGGACCCCACATAGTCAGTGC |
| fwd_HEK293_site4_off9_HTS | ACACTCTTTCCCTACACGACGCTCTTCCGATCTNNNNGCTGTCAGCCCTATCTCCATC |
| rev_HEK293_site4_off9_HTS | TGGAGTTCAGACGTGTGCTCTTCCGATCTTGGGCAATTAGGACAGGGAC |
| fwd_HEK293_site4_off10_HTS | ACACTCTTTCCCTACACGACGCTCTTCCGATCTNNNNGCAGCGGAGGAGGTAGATTG |
| rev_HEK293_site4_off10_HTS | TGGAGTTCAGACGTGTGCTCTTCCGATCTCTCAGTACCTGGAGTCCCGA |
| fwd_HEK2_ChIP_off1_HTS | ACACTCTTTCCCTACACGACGCTCTTCCGATCTNNNNGACAGGCTCAGgAAAGCTGT |
| rev_HEK2_ChIP_off1_HTS | TGGAGTTCAGACGTGTGCTCTTCCGATCTACACAAGCCTTTCTCCAGGG |
| fwd_HEK2_ChIP_off2_HTS | ACACTCTTTCCCTACACGACGCTCTTCCGATCTNNNNAATAGGGGGTGAGACTGGGG |
| rev_HEK2_ChIP_off2_HTS | TGGAGTTCAGACGTGTGCTCTTCCGATCTGCCTCAGACGAGACTTGAGG |
| fwd_HEK2_ChIP_off3_HTS | ACAGTCTTTCCCTACACGACGCTCTTCCGATCTNNNNGGCCAGCAGGAAAGGAATCT |
| rev HEK2 ChIP off3 HTS | TGGAGTTCAGACGTGTGCTCTTCCGATCTTGACTGCACCTGTAGCCATG |
| fwd_HEK2_ChIP_off4_HTS | ACACTCTTTCCCTAGACGACGCTCTTCCGATCTNNNNTCAAGGAAATCACCCTGCCC |
| rev_HEK2_ChIP_off4_HTS | TGGAGTTCAGACGTGTGCTCTTCCGATCTAACTTCCTTGGTGTGCAGCT |
| fwd_HEK2_ChIP_off5_HTS | ACACTCTTTCCCTACACGACGCTCTTCCGATCTNNNNATGGGCTCAGCTACGTCATG |
| rev HEK2 ChIP off5 HTS | TGGAGTTCAGACGTGTGCTCTTCCGATCTAATAGCAGTGTGGTGGGCAA |
| fwd_HEK3_ChIP_off1_HTS | ACACTCTTTCCCTACACGACGCTCTTCCGATCTNNNNCGCACATCCCTTGTCTCTCT |
| rev_HEK3_ChIP_off1_HTS | TGGAGTTCAGACGTGTGCTCTTCCGATCTCTACTGGAGCACACCCCAAG |
| fwd_HEK3_ChIP_off2_HTS | ACACTCTTTCCCTACACGACGCTCTTCCGATCTNNNNTGGGTCACGTAGCTTTGGTC |
| rev_HEK3_ChIP_off2_HTS | TGGAGTTCAGACGTGTGCTCTTCCGATCTTGGTGGCCATGTGCAACTAA |
| fwd_HEK3_ChIP_off3_HTS | ACACTCTTTCCCTACACGACGCTCTTCCGATCTNNNNCTACTACGTGCCAGCTCAGG |
| rev_HEK3_ChIP_off3_HTS | TGGAGTTCAGACGTGTGCTCTTCCGATCTACCTCCCCTCCTCACTAACC |
| fwd_HEK3_ChIP_off4_HTS | ACACTCTTTCCCTACACGACGCTCTTCCGATCTNNNNGCCTCAGCTCCATTTCCTGT |
| rev_HEK3_ChIP_off4_HTS | TGAGTTCAGACGTGTGCTCTTCCGATCTAACCTTTATGGCACCAGGGG |
| fwd_HEK3_ChIP_off5_HTS | ACACTCTTTCCCTACACGACGCTCTTCCGATCTNNNNGAGCTCAGCATTAGCAGGCT |
| rev_HEK3_ChIP_off5_HTS | TGGAGTTCAGACGTGTGCTCTTCCGATCTTTCCTGGCTTTCCGATTCCC |
| fwd_HEK4_ChIP_off1_HTS | ACACTCTTTCCCTACACGACGCTCTTCCGATCTNNNNGTGCAATTGGAGGAGGAGCT |
| rev_HEK4_ChIP_off1_HTS | TGGAGTTCAGACGTGTGCTCTTCCGATCTCACCAGCTACAGGCAGAACA |
| fwd_HEK4_ChIP_off3_HTS | ACACTCTTTCCCTACACGACGCTCTTCCGATCTNNNNCCTACCCCCAACACAGATGG |
| rev_HEK4_ChIP_off3_HTS | TGGAGTTCAGACGTGTGCTCTTCCGATCTCCACACAACTCAGGTCCTCC |

[0502] Sequences of Single-Stranded Oligonucleotide Donor Templates (ssODNs) Used in Hdr Studies.

EMX1 sense
(SEQ ID NO: 470)
TCATCTGTGCCCCTCCCTCCCTGGCCCAGGTGAAGGTGTGGTTCCAGAACCGGAGGACAAAGTACA
AACGGCAGAAGCTGGAGGAGGAAGGGCCTGAGTTTGAGCAGAAGAAGAAGGGCTCCCATCACATC
AACCGGTGGCGCATTGCCACGAAGCAGGCCAATGGGGAGGACATCGATGTCACCTCCAATGACTAG
GGT
EMX1 antisense
(SEQ ID NO: 471)
ACCCTAGTCATTGGAGGTGACATCGATGTCCTCCCCATTGGCCTGCTTCGTGGCAATGCGCCACCG
GTTGATGTGATGGGAGCCCTTCTTCTTCTGCTCAAACTGAGGCCCTTCCTCCTCCAGCTTCTGCCGT
TTGTACTTTGTCCTCCGGTTCTGGAACCACACCTTCACCTGGGCCAGGGAGGGAGGGGCACAGATGA
HEK293 site 3 sense
(SEQ ID NO: 472)
CATGCAATTAGTCTATTTCTGCTGCAAGTAAGCATGCATTTGTAGGCTTGATGCTTTTTTTCTGCTTCT
CCAGCCCTGGCCTGGGTCAATCCTTGGGGCTTAGACTGAGCACGTGATGGCAGAGGAAAGGAAGC
CCTGCTTCCTCCAGAGGGCGTCGCAGGACAGCTTTTCCTAGACAGGGGCTAGTATGTGCAGCTCCT
HEK293 site 3 antisense
(SEQ ID NO: 473)
AGGAGCTGCACATACTAGCCCCTGTCTAGGAAAAGCTGTCCTGCGACGCCCTCTGGAGGAAGCAGG
GCTTCCTTTCCTCTGCCATCACGTGCTCAGTCTAAGCCCCAAGGATTGACCCAGGCCAGGGCTGGA
GAAGCAGAAAAAAAGCATCAAGCCTACAAATGCATGCTTACTTGCAGCAGAAATAGACTAATTGCATG
HEK site 4 sense
(SEQ ID NO: 474)
GGCTGACAAAGGCCGGGCTGGGTGGAAGGAAGGGAGGAAGGGCGAGGCAGAGGGTCCAAAGCAG
GATGACAGGCAGGGGCACCGCGGCGCCCCGGTGGCATTGCGGCTGGAGGTGGGGGTTAAAGCGG
AGACTCTGGTGCTGTGTGACTACAGTGGGGGCCCTGCCCTCTCTGAGCCCCCGCCTCCAGGCCTGT
GTGTGT
HEK site 4 antisense
(SEQ ID NO: 475)
ACACACACAGGCCTGGAGGCGGGGGCTCAGAGAGGGCAGGGCCCCCACTGTAGTCACACAGCACC
AGAGTCTCCGCTTTAACCCCCACCTCCAGCCGCAATGCCACCGGGGCGCCGCGGTGCCCCTGCCT
GTCATCCTGCTTTGGACCCTCTGCCTCGCCCTTCCTCCCTTCCTTCCACCCAGCCCGGCCTTTGTCA
GCC
APOE4 sense
(SEQ ID NO: 476)
AGCACCGAGGAGCTGCGGGTGCGCCTCGCCTCCCACCTGCGCAAGCTGCGTAAGCGGCTCCTCCG
CGATGCCGATGACCTGCAGAAGTGCCTGGCAGTGTACCAGGCCGGGGCCCGCGAGGGCGCCGAG
CGCGGCCTCAGCGCCATCCGCGAGCGCCTGGGGCCCCTGGTGGAACAGGGCCGCGTGCGGGCCG
CCACTGT
APOE4 antisense
(SEQ ID NO: 477)
ACAGTGGCGGCCCGCACGCGGCCCTGTTCCACCAGGGGCCCCAGGCGCTCGCGGATGGCGCTGA
GGCCGCGCTCGGCGCCCTCGCGGGCCCCGGCCTGGTACACTGCCAGGCACTTCTGCAGGTCATCG
GCATCGCGGAGGAGCCGCTTACGCAGCTTGCGCAGGTGGGAGGCGAGGCGCACCCGCAGCTCCT
CGGTGCT
p53 Y163C sense
(SEQ ID NO: 478)
ACTCCCCTGCCCTCAACAAGATGTTTTGCCAACTGGCCAAGACCTGCCCTGTGCAGCTGTGGGTTGA
TTCCACACCCCCGCCCGGCACCCGCGTCCGCGCCATGGCCATCTACAAGCAGTCACAGCACATGAC
GGAGGTTGTGAGGCGCTGCCCCCACCATGAGCGCTGCTCAGATAGCGATGGTGAGCAGCTGGGGC
TG
p53 Y163C antisense
(SEQ ID NO: 479)
CAGCCCCAGCTGCTCACCATCGCTATCTGAGCAGCGCTCATGGTGGGGGCAGCGCCTCACAACCTC
CGTCATGTGCTGTGACTGCTTGTAGATGGCCATGGCGCGGACGCGGGTGCCGGGCGGGGGTGTGG
AATCAACCCACAGCTGCACAGGGCAGGTCTTGGCCAGTTGGCAAAACATCTTGTTGAGGGCAGGGG
AGT

[0503] Deaminase Gene gBlocks Gene Fragments

hAID
(SEQ ID NO: 169)
rAPOBEC1 (mammalian)
(SEQ ID NO: 170)
CATCCTTGGTACCGAGCTCGGATCCAGCCACCATGAGCTCAGAGACTGGCCCAGTGGCTGTGGACC
CCACATTGAGACGGCGGATCGAGCCCCATGAGTTTGAGGTATTCTTCGATCCGAGAGAGCTCCGCA
AGGAGACCTGCCTGCTTTACGAAATTAATTGGGGGGGCCGGCACTCCATTTGGCGACATACATCACA
GAACACTAACAAGCACGTCGAAGTCAACTTCATCGAGAAGTTCACGACAGAAAGATATTTCTGTCCG
AACACAAGGTGCAGCATTACCTGGTTTCTCAGCTGGAGCCCATGCGGCGAATGTAGTAGGGCCATC
ACTGAATTCCTGTCAAGGTATCCCCACGTCACTCTGTTTATTTACATCGCAAGGCTGTACCACCACGC
TGACCCCCGCAATCGACAAGGCCTGCGGGATTTGATCTCTTCAGGTGTGACTATCCAAATTATGACT
GAGCAGGAGTCAGGATACTGCTGGAGAAACTTGTGAATTATAGCCCGAGTAATGAAGCCCACTGG
CCTAGGTATCCCCATCTGTGGGTACGACTGTACGTTCTTGAACTGTACTGCATCATACTGGGCCTGC
CTCCTTGTCTCAACATTCTGAGAAGGAAGCAGCCACAGCTGACATTCTTTACCATCGCTCTTCAGTCT
TGTCATTACCAGCGACTGCCCCCACACATTCTCTGGGCCACCGGGTTGAAATGAGCGGCCGCTCGA
TTGGTTTGGTGTGGCTCTAA
pmCDA1
(SEQ ID NO: 171)
CATCCTTGGTACCGAGCTCGGATCCAGCCACCATGACAGACGCTGAATATGTTAGGATCCATGAAAA
ACTGGATATCTATACATTTAAGAAGCAGTTCTTCAATAACAAAAAGTCAGTATCTCACAGATGCTATGT
CCTGTTCGAACTCAAGAGAAGAGGAGAAAGGCGGGCCTGTTTCTGGGGGTACGCGGTTAATAAACC
CCAGTCCGGGACCGAGAGGGGGATTCACGCCGAGATCTTTTCAATTAGGAAGGTTGAAGAGTATCT
TCGCGACAATCCCGGTCAGTTCACAATTAACTGGTACAGCTCCTGGAGCCCTTGCGCTGATTGCGCC
GAGAAAATACTCGAATGGTACAACCAGGAGTTGAGAGGCAATGGCCACACTCTCAAGATTTGGGCTT
GCAAGCTTTACTACGAGAAGAACGCGAGAAATCAGATTGGCTTGTGGAACCTCAGGGACAACGGGG
TCGGGTTGAATGTTATGGTGTCCGAACATTACCAGTGCTGTAGAAAGATCTTCATTCAGTCCAGTCAC
AATCAGCTGAACGAGAACAGATGGCTGGAGAAAACACTGAAACGGGCAGAGAAAAGGCGCTCAGAG
CTGAGTATCATGATCCAGGTCAAAATCCTGCATACAACCAAAAGCCCGGCTGTATAAGCGGCCGCTC
GATTGGTTTGGTGTGGCTCTAA
haPOBEC3G
(SEQ ID NO: 172)
CATCCTTGGTACCGAGCTCGGATCCAGCCACCATGGAGCTGAAGTATCACCCTGAGATGCGGTTTTT
CCACTGGTTTAGTAAGTGGCGCAAACTTCATCGGGATCAGGAGTATGAAGTGACCTGGTATATCTCT
TGGTCTCCCTGCACAAAATGTACACGCGACATGGCCACATTTCTGGCCGAGGATCCAAAGGTGACG
CTCACAATCTTTGTGGCCCGCCTGTATTATTTCTGGGACCCGGATTATCAGGAGGCACTTAGGTCAT
TGTGCCAAAAGCGCGACGGACCACGGGCGACTATGAAAATCATGAATTATGACGAATTCCAGCATTG
CTGGAGTAAGTTTGTGTACAGCCAGCGGGAGCTGTTCGAGCCCTGGAACAATCTTCCCAAGTACTAC
ATACTGCTTCACATTATGTTGGGGGAGATCCTTCGGCACTCTATGGATCCTCCTACCTTTACGTTAA
CTTTAATAATGAGCCTTGGGTTCGCGGGCGCCATGAAACCTATTTGTGCTACGAGGTCGAGCGGATG
CATAATGATACGTGGGTCCTGCTGAATCAGAGGAGGGGGTTTCTGTGTAACCAGGCTCCACATAAAC
ATGGATTTCTCGAGGGGCGGCACGCCGAACTGTGTTTCCTTGATGTGATACCTTTCTGGAAGCTCGA
CCTTGATCAAGATTACAGGGTGACGTGTTTCACCTCCTGGTCACCCTGCTTCAGTTGCGCCCAAGAG
ATGGCTAAATTTATCAGTAAGAACAAGCATGTGTCCCTCTGTATTTTTACAGCCAGAATTTATGATGAC
CAGGGCCGGTGCCAGGAGGGGCTGCGGACACTCGCTGAGGCGGGCGCGAAGATCAGCATAATGA
CATACTCCGAATTCAAACACTGTTGGGACACTTTTGTGGACCACCAGGGCTGCCCATTTCAGCCGTG
GGATGGGCTCGACGAACATAGTCAGGATCTCTCAGGCCGGCTGCGAGCCATATTGCAGAACCAGGA
GAATTAGGCGGCCGCTCGATTGGTTTGGTGTGGCTCTAA
rAPOBEC1(E. Coli)
(SEQ ID NO: 173)
GGCCGGGGATTCTAGAAATAATTTTGTTTAACTTTAAGAAGGAGATATACCATGGATGTCTTCTGAAA
CCGGTCCGGTTGCGGTTGACCCGACCCTGCGTCGTCGTATCGAACCGCACGAATTCGAAGTTTTCT
TCGACCCGCGTGAACTGCGTAAAGAAACCTGCCTGCTGTACGAAATCAACTGGGGTGGTCGTCACT
CTATCTGGCGTCACACCTCTCAGAACACCAACAAACACGTTGAAGTTAACTTCATCGAAAAATTCACC
ACCGAACGTTACTTCTGCCCGAACACCCGTTGCTCTATCACCTGGTTCCTGTCTTGGTCTCCGTGCG
GTGAATGCTCTCGTGCGATCACCGAATTCCTGTCTCGTTACCCGCACGTTACCCTGTTCATCTACATC
GCGCGTCTGTACCACCACGCGGACCCGCGTAACCGTCAGGGTCTGCGTGACCTGATCTCTTCTGGT
GTTACCATCCAGATCATGACCGAACAGGAATCTGGTTACTGCTGGCGTAACTTCGTTAACTACTCTCC
GTCTAACGAAGCGCACTGGCCGCGTTACCCGCACCTGTGGGTTCGTCTGTACGTTCTGGAACTGTA
CTGCATCATCCTGGGTCTGCCGCCGTGCCTGAACATCCTGCGTCGTAAACAGCCGCAGCTGACCTT
CTTCACCATCGCGCTGCAGTCTTGCCACTACCAGCGTCTGCCGCCGCACATCCTGTGGGCGACCGG
TCTGAAAGGTGGTAGTGGAGGGAGCGGCGGTTCAATGGATAAGAAATAC

[0504] Amino Acid Sequences of NBE1, NBE2, and NBE3.

NBE1 for E. Coli expression (His₆-rAPOBEC1-XTEN-dCas9) (SEQ ID NO: 154)

MGSSHHHHHHMSSETGPVAVDPTLRRRIEPHEFEVFFDPRELRKETCLLY
EINWGGRHSIWRHTSQNTNKHVEVNFIEKFTTERYFCPNTRCSITWFLSW
SPCGECSRAITEFLSRYPHVTLFIYIARLYHHADPRNRQGLRDLISSGVT
IQIMTEQESGYCWRNFVNYSPSNEAHWPRYPHLWVRLYVLELYCIILGLP
PCLNILRRKQPQLTFFTIALQSCHYQRLPPHILWATGLKSGSETPGTSES
ATPESDKKYSIGLAIGTNSVGWAVITDEYKVPSKKFKVLGNTDRHSIKKN
LIGALLFDSGETAEATRLKRTARRRYTRRKNRICYLQEIFSNEMAKVDDS
FFHRLEESFLVEEDKKHERHPIFGNIVDEVAYHEKYPTIYHLRKKLVDST
DKADLRLIYLALAHMIKFRGHFLIEGDLNPDNSDVDKLFIQLVQTYNQLF
EENPINASGVDAKAILSARLSKSRRLENLIAQLPGEKKNGLFGNLIALSL
GLTPNFKSNFDLAEDAKLQLSKDTYDDDLDNLLAQIGDQYADLFLAAKNL
SDAILLSDILRVNTEITKAPLSASMIKRYDEHHQDLTLLKALVRQQLPEK
YKEIFFDQSKNGYAGYIDGGASQEEFYKFIKPILEKMDGTEELLVKLNRE
DLLRKQRTFDNGSIPHQIHLGELHAILRRQEDFYPFLKDNREKIEKILTF
RIPYYVGPLARGNSRFAWMTRKSEETITPWNFEEVVDKGASAQSFIERMT
NFDKNLPNEKVLPKHSLLYEYFTVYNELTKVKYVTEGMRKPAFLSGEQKK
AIVDLLFKTNRKVTVKQLKEDYFKKIECFDSVEISGVEDRFNASLGTYHD
LLKIIKDKDFLDNEENEDILEDIVLTLTLFEDREMIEERLKTYAHLFDDK
VMKQLKRRRYTGWGWGRLSRKLINGIRDKQSGKTILDFLKSDGFANRNFM
QLIHDDSLTFKEDIQKAQVSGQGDSLHEHIANLAGSPAIKKGILQTVKVV
DELVKVMGRHKPENIVIEMARENQTTQKGQKNSRERMKRIEEGIKELGSQ
ILKEHPVENTQLQNEKLYLYYLQNGRDMYVDQELDINRLSDYDVDAIVPQ
SFLKDDSIDNKVLTRSDKNRGKSDNVPSEEVVKKMKNYWRQLLNAKLITQ
RKFDNLTKAERGGLSELDKAGFIKRQLVETRQITKHVAQILDSRMNTKYD
ENDKLIREVKVITLKSKLVSDFRKDFQFYKVREINNYHHAHDAYLNAVVG
TALIKKYPKLESEFVYGDYKVYDVRKMIAKSEQEIGKATAKYFFYSNIMN
FFKTEITLANGEIRKRPLIETNGETGEIVWDKGRDFATVRKVLSMPQVNI
VKKTEVQTGGFSKESILPKRNSDKLIARKKDWDPKKYGGFDSPTVAYSVL
VVAKVEKGKSKKLKSVKELLGITIMERSSFEKNPIDFLEAKGYKEVKKDL
IIKLPKYSLFELENGRKRMLASAGELQKGNELALPSKYVNFLYLASHYEK
LKGSPEDNEQKQLFVEQHKHYLDEIIEQISEFSKRVILADANLDKVLSAY
NKHRDKPIREQAENIIHLFTLTNLGAPAAFKYFDTTIDRKRYTSTKEVLD
ATLIHQSITGLYETRIDLSQLGGDSGGSPKKKRKV

NBE1 for Mammalian expression (rAPOBEC1-XTEN-dCas9-NLS) (SEQ ID NO: 155)

MSSETGPVAVDPTLRRRIEPHEFEVFFDPRELRKETCLLYEINWGGRHSI
WRHTSQNTNKHVEVNFIEKFTTERYFCPNTRCSITWFLSWSPCGECSRAI
TEFLSRYPHVTLFIYIARLYHHADPRNRQGLRDLISSGVTIQIMTEQESG
YCWRNFVNYSPSNEAHWPRYPHLWVRLYVLELYCIILGLPPCLNILRRKQ
PQLTFFTIALQSCHYQRLPPHILWATGLKSGSETPGTSESATPESDKKYS
IGLAIGTNSVGWAVITDEYKVPSKKFKVLGNTDRHSIKKNLIGALLFDSG
ETAEATRLKRTARRRYTRRKNRICYLQEIFSNEMAKVDDSFFHRLEESFL
VEEDKKHERHPIFGNIVDEVAYHEKYPTIYHLRKKLVDSTDKADLRLIYL
ALAHMIKFRGHFLIEGDLNPDNSDVDKLFIQLVQTYNQLFEENPINASGV
DAKAILSARLSKSRRLENLIAQLPGEKKNGLFGNLIALSLGLTPNFKSNF
DLAEDAKLQLSKDTYDDDLDNLLAQIGDQYADLFLAAKNLSDAILLSDIL
RVNTEITKAPLSASMIKRYDEHHQDLTLLKALVRQQLPEKYKEIFFDQSK
NGYAGYIDGGASQEEFYKFIKPILEKMDGTEELLVKLNREDLLRKQRTFD
NGSIPHQIHLGELHAILRRQEDFYPFLKDNREKIEKILTFRIPYYVGPLA
RGNSRFAWMTRKSEETITPWNFEEVVDKGASAQSFIERMTNFDKNLPNEK
VLPKHSLLYEYFTVYNELTKVKYVTEGMRKPAFLSGEQKKAIVDLLFKTN
RKVTVKQLKEDYFKKIECFDSVEISGVEDRFNASLGTYHDLLKIIKDKDF
LDNEENEDILEDIVLTLTLFEDREMIEERLKTYAHLFDDKVMKQLKRRRY
TGWGRLSRKLINGIRDKQSGKTILDFLKSDGFANRNFMQLIHDDSLTFKE
DIQKAQVSGQGDSLHEHIANLAGSPAIKKGILQTVKVVDELVKVMGRHKP
ENIVIEMARENQTTQKGQKNSRERMKRIEEGIKELGSQILKEHPVENTQL
QNEKLYLYYLQNGRDMYVDQELDINRLSDYDVDAIVPQSFLKDDSIDNKV
LTRSDKNRGKSDNVPSEEVVKKMKNYWRQLLNAKLITQRKFDNLTKAERG
GLSELDKAGFIKRQLVETRQITKHVAQILDSRMNTKYDENDKLIREVKVI
TLKSKLVSDFRKDFQFYKVREINNYHHAHDAYLNAVVGTALIKKYPKLES
EFVYGDYKVYDVRKMIAKSEQEIGKATAKYFFYSNIMNFFKTEITLANGE
IRKRPLIETNGETGEIVWDKGRDFATVRKVLSMPQVNIVKKTEVQTGGFS
KESILPKRNSDKLIARKKDWDPKKYGGFDSPTVAYSVLVVAKVEKGKSKK
LKSVKELLGITIMERSSFEKNPIDFLEAKGYKEVKKDLIIKLPKYSLFEL
ENGRKRMLASAGELQKGNELALPSKYVNFLYLASHYEKLKGSPEDNEQKQ
LFVEQHKHYLDEIIEQISEFSKRVILADANLDKVLSAYNKHRDKPIREQA
ENIIHLFTLTNLGAPAAFKYFDTTIDRKRYTSTKEVLDATLIHQSITGLY
ETRIDLSQLGGDSGGSPKKKRKV

Alternative NBE1 for Mammalian expression with human APOBEC1 (hAPOBEC1-XTEN-dCas9-NLS) (SEQ ID NO: 158)

MTSEKGPSTGDPTLRRRIEPWEFDVFYDPRELRKEACLLYEIKWGMSRKI
WRSSGKNTTNHVEVNFIKKFTSERDFHPSMSCSITWFLSWSPCWECSQAI
REFLSRHPGVTLVIYVARLFWHMDQQNRQGLRDLVNSGVTIQIMRASEYY
HCWRNFVNYPPGDEAHWPQYPPLWMMLYALELHCIILSLPPCLKISRRWQ
NHLTFFRLHLQNCHYQTIPPHILLATGLIHPSVAWRGSETPGTSESATPE
SDKKYSIGLAIGTNSVGWAVITDEYKVPSKKFKVLGNTDRHSIKKNLIGA
LLFDSGETAEATRLKRTARRRYTRRKNRICYLQEIFSNEMAKVDDSFFHR
LEESFLVEEDKKHERHPIFGNIVDEVAYHEKYPTIYHLRKKLVDSTDKAD
LRLIYLALAHMIKFRGHFLIEGDLNPDNSDVDKLFIQLVQTYNQLFEENP
INASGVDAKAILSARLSKSRRLENLIAQLGEKKNGLFGNLIALSLGLTPN
FKSNFDLAEDAKLQLSKDTYDDDLDNLLAQIGDQYADLFLAAKNLSDAIL
LSDILRVNTEITKAPLSASMIKRYDEHHQDLTLLKALVRQQLPEKYKEIF
FDQSKNGYAGYIDGGASQEEFYKFIKPILEKMDGTEELLVKLNREDLLRK
QRTFDNGSPHQIHLGELHAILRRQEDFYPFLKDNREKIEKILTFRIPYYV
GPLARGNSRFAWMTRKSEETITPWNFEEVVDKGASAQSFIERMTNFDKNL
PNEKVLPKHSLLYEYFTVYNELTKVKYVTEGMRKPAFLSGEQKKAIVDLL
FKTNRKVTVKQLKEDYFKKIECFDSVEISGVEDRFNASLGTYHDLLKIIK
DKDFLDNEENEDILEDIVLTLTLFEDREMIEERLKTYAHLFDDKVMKQLK
RRRYTGWGRLSRKLINGIRDKQSGKTILDFLKSDGFANRNFMQLIHDDSL
TFKEDIQKAQVSGQGDSLHEHIANLAGSPAIKKGILQTVKVVDELVKVMG
RHKPENIVIEMARENQTTQKGQKNSRERMKRIEEGIKELGSQILKEHPVE
NTQLQNEKLYLYYLQNGRDMYVDQELDINRLSDYDVDAIVPQSFLKDDSI
DNKVLTRSDKNRGKSDNVPSEEVVKKMKNYWRQLLNAKLITQRKFDNLTK
AERGGLSELDKAGFIKRQLVETRQITKHVAQILDSRMNTKYDENDKLIRE
VKVITLKSKLVSDFRKDFQFYKVREINNYHHAHDAYLNAVVGTALIKKYP
KLESEFVYGDYKVYDVRKMIAKSEQEIGKATAKYFFYSNIMNFFKTEITL
ANGEIRKRPLIETNGETGEIVWDKGRDFATVRKVLSMPQVNIVKKTEVQT
GGFSKESILPKRNSDKLIARKKDWDPKKYGGFDSPTVAYSVLVVAKVEKG
KSKKLKSVKELLGITIMERSSFEKNPIDFLEAKGYKEVKKDLIIKLPKYS
LFELENGRKRMLASAGELQKGNELALPSKYVNFLYLASHYEKLKGSPEDN
EQKQLFVEQHKHYLDEIIEQISEFSKRVILADANLDKVLSAYNKHRDKPI
REQAENIIHLFTLTNLGAPAAFKYFDTTIDRKRYTSTKEVLDATLIHQSI
TGLYETRIDLSQLGGDSGGSPKKKRKV

NBE2 (rAPOBEC1-XTEN-dCas9-UGI-NLS) (SEQ ID NO: 156)

MSSETGPVAVDPTLRRRIEPHEFEVFFDPRELRKETCLLYEINWGGRHSI
WRHTSQNTNKHVEVNFIEKFTTERYFCPNTRCSITWFLSWSPCGECSRAI
TEFLSRYPHVTLFIYIARLYHHADPRNRQGLRDLISSGVTIQIMTEQESG
YCWRNFVNYSPSNEAHWPRYPHLWVRLYVLELYCIILGLPPCLNILRRKQ
PQLTFFTIALQSCHYQRLPPHILWATGLKSGSETPGTSESATPESDKKYS
IGLAIGTNSVGWAVITDEYKVPSKKFKVLGNTDRHSIKKNLIGALLFDSG
ETAEATRLKRTARRRYTRRKNRICYLQEIFSNEMAKVDDSFFHRLEESF
LVEEDKKHERHPIFGNIVDEVAYHEKYPTIYHLRKKLVDSTDKADLRLIY
LALAHMIKFRGHFLIEGDLNPDNSDVDKLFIQLVQTYNQLFEENPINASG
VDAKAILSARLSKSRRLENLIAQLPGEKKNGLFGNLIALSLGLTPNFKSN
FDLAEDAKLQLSKDTYDDDLDNLLAQIGDQYADLFLAAKNLSDAILLSDI
LRVNTEITKAPLSASMIKRYDEHHQDLTLLKALVRQQLPEKYKEIFFDQS
KNGYAGYIDGGASQEEFYKFIKPILEKMDGTEELLVKLNREDLLRKQRTF
DNGSIPHQIHLGELHAILRRQEDFYPFLKDNREKIEKILTFRIPYYVGPL
ARGNSRFAWMTRKSEETITPWNFEEVVDKGASAQSFIERMTNFDKNLPNE
KVLPKHSLLYEYFTVYNELTKVKYVTEGMRKPAFLSGEQKKAIVDLLFKT
NRKVTVKQLKEDYFKKIECFDSVEISGVEDRFNASLGTYHDLLKIIKDKD
FLDNEENEDILEDIVLTLTLFEDREMIEERLKTYAHLFDDKVMKQLKRRR
YTGWGRLSRKLINGIRDKQSGKTILDFLKSDGFANRNFMQLIHDDSLTFK
EDIQKAQVSGQGDSLHEHIANLAGSPAIKKGILQTVKVVDELVKVMGRHK
PENIVIEMARENQTTQKGQKNSRERMKRIEEGIKELGSQILKEHPVENTQ
LQNEKLYLYYLQNGRDMYVDQELDINRLSDYDVDAIVPQSFLKDDSIDNK
VLTRSDKNRGKSDNVPSEEVVKKMKNYWRQLLNAKLITQRKFDNLTKAER
GGLSELDKAGFIKRQLVETRQITKHVAQILDSRMNTKYDENDKLIREVKV
ITLKSKLVSDFRKDFQFYKVREINNYHHAHDAYLNAVVGTALIKKYPKLE
SEFVYGDYKVYDVRKMIAKSEQEIGKATAKYFFYSNIMNFFKTEITLANG
EIRKRPLIETNGETGEIVWDKGRDFATVRKVLSMPQVNIVKKTEVQTGGF
SKESILPKRNSDKLIARKKDWDPKKYGGFDSPTVAYSVLVVAKVEKGKSK
KLKSVKELLGITIMERSSFEKNPIDFLEAKGYKEVKKDLIIKLPKYSLFE
LENGRKRMLASAGELQKGNELALPSKYVNFLYLASHYEKLKGSPEDNEQK
QLFVEQHKHYLDEIIEQISEFSKRVILADANLDKVLSAYNKHRDKPIREQ
AENIIHLFTLTNLGAPAAFKYFDTTIDRKRYTSTKEVLDATLIHQSITGL
YETRIDLSQLGGDSGGSTNLSDIIEKETGKQLVIQESILMLPEEVEEVIG
NKPESDILVHTAYDESTDENVMLLTSDAPEYKPWALVIQDSNGENKIKML
SGGSPKKKRKV

NBE3 (rAPOBEC1-XTEN-Cas9n-UGI-NLS) (SEQ ID NO: 157)

MSSETGPVAVDPTLRRRIEPHEFEVFFDPRELRKETCLLYEINWGGRHSI
WRHTSQNTNKHVEVNFIEKFTTERYFCPNTRCSITWFLSWSPCGECSRAI
TEFLSRYPHVTLFIYIARLYHHADPRNRQGLRDLISSGVTIQIMTEQESG
YCWRNFVNYSPSNEAHWPRYPHLWVRLYVLELYCIILGLPPCLNILRRKQ
PQLTFFTIALQSCHYQRLPPHILWATGLKSGSETPGTSESATPESDKKYS
IGLAIGTNSVGWAVITDEYKVPSKKFKVLGNTDRHSIKKNLIGALLFDSG
ETAEATRLKRTARRRYTRRKNRICYLQEIFSNEMAKVDDSFFHRLEESFL
VEEDKKHERHPIFGNIVDEVAYHEKYPTIYHLRKKLVDSTDKADLRLIYL
ALAHMIKFRGHFLIEGDLNPDNSDVDKLFIQLVQTYNQLFEENPINASGV
DAKAILSARLSKSRRLENLIAQLPGEKKNGLFGNLIALSLGLTPNFKSNF
DLAEDAKLQLSKDTYDDDLDNLLAQIGDQYADLFLAAKNLSDAILLSDIL
RVNTEITKAPLSASMIKRYDEHHQDLTLLKALVRQQLPEKYKEIFFDQSK
NGYAGYIDGGASQEEFYKFIKPILEKMDGTEELLVKLNREDLLRKQRTFD
NGSIPHQIHLGELHAILRRQEDFYPFLKDNREKIEKILTFRIPYYVGPLA
RGNSRFAWMTRKSEETITPWNFEEVVDKGASAQSFIERMTNFDKNLPNEK
VLPKHSLLYEYFTVYNELTKVKYVTEGMRKPAFLSGEQKKAIVDLLFKTN
RKVTVKQLKEDYFKKIECFDSVEISGVEDRFNASLGTYHDLLKIIKDKDF
LDNEENEDILEDIVLTLTLFEDREMIEERLKTYAHLFDDKVMKQLKRRRY
TGWGRLSRKLINGIRDKQSGKTILDFLKSDGFANRNFMQLIHDDSLTFKE
DIQKAQVSGQGDSLHEHIANLAGSPAIKKGILQTVKVVDELVKVMGRHKP
ENIVIEMARENQTTQKGQKNSRERMKRIEEGIKELGSQILKEHPVENTQL
QNEKLYLYYLQNGRDMYVDQELDINRLSDYDVDHIVPQSFLKDDSIDNKV
LTRSDKNRGKSDNVPSEEVVKKMKNYWRQLLNAKLITQRKFDNLTKAERG
GLSELDKAGFIKRQLVETRQITKHVAQILDSRMNTKYDENDKLIREVKVI
TLKSKLVSDFRKDFQFYKVREINNYHHAHDAYLNAVVGTALIKKYPKLES
EFVYGDYKVYDVRKMIAKSEQEIGKATAKYFFYSNIMNFFKTEITLANGE
IRKRPLIETNGETGEIVWDKGRDFATVRKVLSMPQVNIVKKTEVQTGGFS
KESILPKRNSDKLIARKKDWDPKKYGGFDSPTVAYSVLVVAKVEKGKSKK
LKSVKELLGITIMERSSFEKNPIDFLEAKGYKEVKKDLIIKLPKYSLFEL
ENGRKRMLASAGELQKGNELALPSKYVNFLYLASHYEKLKGSPEDNEQKQ
LFVEQHKHYLDEIIEQISEFSKRVILADANLDKVLSAYNKHRDKPIREQA
ENIIHLFTLTNLGAPAAFKYFDTTIDRKRYTSTKEVLDATLIHQSITGLY
ETRIDLSQLGGDSGGSTNLSDIIEKETGKQLVIQESILMLPEEVEEVIGN
KPESDILVHTAYDESTDENVMLLTSDAPEYKPWALVIQDSNGENKIKMLS
GGSPKKKRKV

pmCDA1-XTEN-dCas9-UGI (bacteria) (SEQ ID NO: 159)

MTDAEYVRIHEKLDIYTFKKQFFNNKKSVSHRCYVLFELKRRGERRACFW
GYAVNKPQSGTERGIHAEIFSIRKVEEYLRDNPGQFTINWYSSWSPCADC
AEKILEWYNQELRGNGHTLKIWACKLYYEKNARNQIGLWNLRDNGVGLNV
MVSEHYQCCRKIFIQSSHNQLNENRWLEKTLKRAEKRRSELSIMIQVKIL
HTTKSPAVSGSETPGTSESATPESDKKYSIGLAIGTNSVGWAVITDEYKV
PSKKFKVLGNTDRHSIKKNLIGALLFDSGETAEATRLKRTARRRYTRRKN
RICYLQEIFSNEMAKVDDSFFHRLEESFLVEEDKKHERHPIFGNIVDEVA
YHEKYPTIYHLRKKLVDSTDKADLRLIYLALAHMIKFRGHFLIEGDLNPD
NSDVDKLFIQLVQTYNQLFEENPINASGVDAKAILSARLSKSRRLENLIA
QLPGEKKNGLFGNLIALSLGLTPNFKSNFDLAEDAKLQLSKDTYDDDLDN
LLAQIGDQYADLFLAAKNLSDAILLSDILRVNTEITKAPLSASMIKRYDE
HHQDLTLLKALVRQQLPEKYKEIFFDQSKNGYAGYIDGGASQEEFYKFIK
PILEKMDGTEELLVKLNREDLLRKQRTFDNGSIPHQIHLGELHAILRRQE
DFYPFLKDNREKIEKILTFRIPYYVGPLARGNSRFAWMTRKSEETITPWN
FEEVVDKGASAQSFIERMTNFDKNLPNEKVLPKHSLLYEYFTVYNELTKV
KYVTEGMRKPAFLSGEQKKAIVDLLFKTNRKVTVKQLKEDYFKKIECFDS
VEISGVEDRFNASLGTYHDLLKIIKDKDFLDNEENEDILEDIVLTLTLFE
DREMIEERLKTYAHLFDDKVMKQLKRRRYTGWGRLSRKLINGIRDKQSGK
TILDFLKSDGFANRNFMQLIHDDSLTFKEDIQKAQVSGQGDSLHEHIANL
AGSPAIKKGILQTVKVVDELVKVMGRHKPENIVIEMARENQTTQKGQKNS
RERMKRIEEGIKELGSQILKEHPVENTQLQNEKLYLYYLQNGRDMYVDQE
LDINRLSDYDVDAIVPQSFLKDDSIDNKVLTRSDKNRGKSDNVPSEEVVK
KMKNYWRQLLNAKLITQRKFDNLTKAERGGLSELDKAGFIKRQLVETRQI
TKHVAQILDSRMNTKYDENDKLIREVKVITLKSKLVSDFRKDFQFYKVRE
INNYHHAHDAYLNAVVGTALIKKYPKLESEFVYGDYKVYDVRKMIAKSEQ
EIGKATAKYFFYSNIMNFFKTEITLANGEIRKRPLIETNGETGEIVWDKG
RDFATVRKVLSMPQVNIVKKTEVQTGGFSKESILPKRNSDKLIARKKDWD
PKKYGGFDSPTVAYSVLVVAKVEKGKSKKLKSVKELLGITIMERSSFEKN
PIDFLEAKGYKEVKKDLIIKLPKYSLFELENGRKRMLASAGELQKGNELA
LPSKYVNFLYLASHYEKLKGSPEDNEQKQLFVEQHKHYLDEIIEQISEFS
KRVILADANLDKVLSAYNKHRDKPIREQAENIIHLFTLTNLGAPAAFKYF
DTTIDRKRYTSTKEVLDATLIHQSITGLYETRIDLSQLGGDSGGSMTNLS
DIIEKETGKQLVIQESILMLPEEVEEVIGNKPESDILVHTAYDESTDENV
MLLTSDAPEYKPWALVIQDSNGENKIKML

pmCDA1-XTEN-nCas9-UGI-NLS (mammalian construct) (SEQ ID NO: 160)

MTDAEYVRIHEKLDIYTFKKQFFNNKKSVSHRCYVLFELKRRGERRACFW
GYAVNKPQSGTERGIHAEIFSIRKVEEYLRDNPGQFTINWYSSWSPCADC
AEKILEWYNQELRGNGHTLKIWACKLYYEKNARNQIGLWNLRDNGVGLNV
MVSEHYQCCRKIFIQSSHNQLNENRWLEKTLKRAEKRRSELSIMIQVKIL
HTTKSPAVSGSETPGTSESATPESDKKYSIGLAIGTNSVGWAVITDEYKV
PSKKFKVLGNTDRHSIKKNLIGALLFDSGETAEATRLKRTARRRYTRRKN
RICYLQEIFSNEMAKVDDSFFHRLEESFLVEEDKKHERHPIFGNIVDEVA
YHEKYPTIYHLRKKLVDSTDKADLRLIYLALAHMIKFRGHFLIEGDLNPD
NSDVDKLFIQLVQTYNQLFEENPINASGVDAKAILSARLSKSRRLENLIA
QLPGEKKNGLFGNLIALSLGLTPNFKSNFDLAEDAKLQLSKDTYDDDLDN
LLAQIGDQYADLFLAAKNLSDAILLSDILRVNTEITKAPLSASMIKRYDE
HHQDLTLLKALVRQQLPEKYKEIFFDQSKNGYAGYIDGGASQEEFYKFIK
PILEKMDGTEELLVKLNREDLLRKQRTFDNGSIPHQIHLGELHAILRRQE
DFYPFLKDNREKIEKILTFRIPYYVGPLARGNSRFAWMTRKSEETITPWN
FEEVVDKGASAQSFIERMTNFDKNLPNEKVLPKHSLLYEYFTVYNELTKV
KYVTEGMRKPAFLSGEQKKAIVDLLFKTNRKVTVKQLKEDYFKKIECFDS
VEISGVEDRFNASLGTYHDLLKIIKDKDFLDNEENEDILEDIVLTLTLFE
DREMIEERLKTYAHLFDDKVMKQLKRRRYTGWGRLSRKLINGIRDKQSGK
TILDFLKSDGFANRNFMQLIHDDSLTFKEDIQKAQVSGQGDSLHEHIANL
AGSPAIKKGILQTVKVVDELVKVMGRHKPENIVIEMARENQTTQKGQKNS
RERMKRIEEGIKELGSQILKEHPVENTQLQNEKLYLYYLQNGRDMYVDQE
LDINRLSDYDVDHIVPQSFLKDDSIDNKVLTRSDKNRGKSDNVPSEEVVK
KMKNYWRQLLNAKLITQRKFDNLTKAERGGLSELDKAGFIKRQLVETRQI
TKHVAQILDSRMNTKYDENDKLIREVKVITLKSKLVSDFRKDFQFYKVRE
INNYHHAHDAYLNAVVGTALIKKYPKLESEFVYGDYKVYDVRKMIAKSEQ
EIGKATAKYFFYSNIMNFFKTEITLANGEIRKRPLIETNGETGEIVWDKG
RDFATVRKVLSMPQVNIVKKTEVQTGGFSKESILPKRNSDKLIARKKDWD
PKKYGGFDSPTVAYSVLVVAKVEKGKSKKLKSVKELLGITIMERSSFEKN
PIDFLEAKGYKEVKKDLIIKLPKYSLFELENGRKRMLASAGELQKGNELA
LPSKYVNFLYLASHYEKLKGSPEDNEQKQLFVEQHKHYLDEIIEQISEFS
KRVILADANLDKVLSAYNKHRDKPIREQAENIIHLFTLTNLGAPAAFKYF
DTTIDRKRYTSTKEVLDATLIHQSITGLYETRIDLSQLGGDSGGSTNLSD
IIEKETGKQLVIQESILMLPEEVEEVIGNKPESDILVHTAYDESTDENVM
LLTSDAPEYKPWALVIQDSNGENKIKMLSGGSPKKKRKV

huAPOBEC3G-XTEN-dCas9-UGI (bacteria) (SEQ ID NO: 161)

MDPPTFTFNFNNEPWVRGRHETYLCYEVERMHNDTWVLLNQRRGFLCNQA
PHKHGFLEGRHAELCFLDVIPFWKLDLDQDYRVTCFTSWSPCFSCAQEMA
KFISKNKHVSLCIFTARIYDDQGRCQEGLRTLAEAGAKISIMTYSEFKHC
WDTFVDHQGCPFQPWDGLDEHSQDLSGRLRAILQSGSETPGTSESATPES
DKKYSIGLAIGTNSVGWAVITDEYKVPSKKFKVLGNTDRHSIKKNLIGAL
LFDSGETAEATRLKRTARRRYTRRKNRICYLQEIFSNEMAKVDDSFFHRL
EESFLVEEDKKHERHPIFGNIVDEVAYHEKYPTIYHLRKKLVDSTDKADL
RLIYLALAHMIKFRGHFLIEGDLNPDNSDVDKLFIQLVQTYNQLFEENPI
NASGVDAKAILSARLSKSRRLENLIAQLPGEKKNGLFGNLIALSLGLTPN
FKSNFDLAEDAKLQLSKDTYDDDLDNLLAQIGDQYADLFLAAKNLSDAIL
LSDILRVNTEITKAPLSASMIKRYDEHHQDLTLLKALVRQQLPEKYKEIF
FDQSKNGYAGYIDGGASQEEFYKFIKPILEKMDGTEELLVKLNREDLLRK
QRTFDNGSIPHQIHLGELHAILRRQEDFYPFLKDNREKIEKILTFRIPYY
VGPLARGNSRFAWMTRKSEETITPWNFEEVVDKGASAQSFIERMTNFDKN
LPNEKVLPKHSLLYEYFTVYNELTKVKYVTEGMRKPAFLSGEQKKAIVDL
LFKTNRKVTVKQLKEDYFKKIECFDSVEISGVEDRFNASLGTYHDLLKII
KDKDFLDNEENEDILEDIVLTLTLFEDREMIEERLKTYAHLFDDKVMKQL
KRRRYTGWGRLSRKLINGIRDKQSGKTILDFLKSDGFANRNFMQLIHDDS
LTFKEDIQKAQVSGQGDSLHEHIANLAGSPAIKKGILQTVKVVDELVKVM
GRHKPENIVIEMARENQTTQKGQKNSRERMKRIEEGIKELGSQILKEHPV
ENTQLQNEKLYLYYLQNGRDMYVDQELDINRLSDYDVDAIVPQSFLKDDS
IDNKVLTRSDKNRGKSDNVPSEEVVKKMKNYWRQLLNAKLITQRKFDNLT
KAERGGLSELDKAGFIKRQLVETRQITKHVAQILDSRMNTKYDENDKLIR
EVKVITLKSKLVSDFRKDFQFYKVREINNYHHAHDAYLNAVVGTALIKKY
PKLESEFVYGDYKVYDVRKMIAKSEQEIGKATAKYFFYSNIMNFFKTEIT
LANGEIRKRPLIETNGETGEIVWDKGRDFATVRKVLSMPQVNIVKKTEVQ
TGGFSKESILPKRNSDKLIARKKDWDPKKYGGFDSPTVAYSVLVVAKVEK
GKSKKLKSVKELLGITIMERSSFEKNPIDFLEAKGYKEVKKDLIIKLPKY
SLFELENGRKRMLASAGELQKGNELALPSKYVNFLYLASHYEKLKGSPED
NEQKQLFVEQHKHYLDEIIEQISEFSKRVILADANLDKVLSAYNKHRDKP
IREQAENIIHLFTLTNLGAPAAFKYFDTTIDRKRYTSTKEVLDATLIHQS
ITGLYETRIDLSQLGGDSGGSMTNLSDIIEKETGKQLVIQESILMLPEEV
EEVIGNKPESDILVHTAYDESTDENVMLLTSDAPEYKPWALVIQDSNGEN
KIKML

huAPOBEC3G-XTEN-nCas9-UGI-NLS (mammalian construct) (SEQ ID NO: 162)

MDPPTFTFNFNNEPWVRGRHETYLCYEVERMHNDTWVLLNQRRGFLCNQA
PHKHGFLEGRHAELCFLDVIPFWKLDLDQDYRVTCFTSWSPCFSCAQEMA
KFISKNKHVSLCIFTARIYDDQGRCQEGLRTLAEAGAKISIMTYSEFKHC
WDTFVDHQGCPFQPWDGLDEHSQDLSGRLRAILQSGSETPGTSESATPES
DKKYSIGLAIGTNSVGWAVITDEYKVPSKKFKVLGNTDRHSIKKNLIGAL
LFDSGETAEATRLKRTARRRYTRRKNRICYLQEIFSNEMAKVDDSFFHRL
EESFLVEEDKKHERHPIFGNIVDEVAYHEKYPTIYHLRKKLVDSTDKADL
RLIYLALAHMIKFRGHFLIEGDLNPDNSDVDKLFIQLVQTYNQLFEENPI
NASGVDAKAILSARLSKSRRLENLIAQLPGEKKNGLFGNLIALSLGLTPN
FKSNFDLAEDAKLQLSKDTYDDDLDNLLAQIGDQYADLFLAAKNLSDAIL
LSDILRVNTEITKAPLSASMIKRYDEHHQDLTLLKALVRQQLPEKYKEIF
FDQSKNGYAGYIDGGASQEEFYKFIKPILEKMDGTEELLVKLNREDLLRK
QRTFDNGSIPHQIHLGELHAILRRQEDFYPFLKDNREKIEKILTFRIPYY
VGPLARGNSRFAWMTRKSEETITPWNFEEVVDKGASAQSFIERMTNFDKN
LPNEKVLPKHSLLYEYFTVYNELTKVKYVTEGMRKPAFLSGEQKKAIVDL
LFKTNRKVTVKQLKEDYFKKIECFDSVEISGVEDRFNASLGTYHDLLKII
KDKDFLDNEENEDILEDIVLTLTLFEDREMIEERLKTYAHLFDDKVMKQL
KRRRYTGWGRLSRKLINGIRDKQSGKTILDFLKSDGFANRNFMQLIHDDS
LTFKEDIQKAQVSGQGDSLHEHIANLAGSPAIKKGILQTVKVVDELVKVM
GRHKPENIVIEMARENQTTQKGQKNSRERMKRIEEGIKELGSQILKEHPV
ENTQLQNEKLYLYYLQNGRDMYVDQELDINRLSDYDVDHIVPQSFLKDDS
IDNKVLTRSDKNRGKSDNVPSEEVVKKMKNYWRQLLNAKLITQRKFDNLT
KAERGGLSELDKAGFIKRQLVETRQITKHVAQILDSRMNTKYDENDKLIR
EVKVITLKSKLVSDFRKDFQFYKVREINNYHHAHDAYLNAVVGTALIKKY
PKLESEFVYGDYKVYDVRKMIAKSEQEIGKATAKYFFYSNIMNFFKTEIT
LANGEIRKRPLIETNGETGEIVWDKGRDFATVRKVLSMPQVNIVKKTEVQ
TGGFSKESILPKRNSDKLIARKKDWDPKKYGGFDSPTVAYSVLVVAKVEK
GKSKKLKSVKELLGITIMERSSFEKNPIDFLEAKGYKEVKKDLIIKLPKY
SLFELENGRKRMLASAGELQKGNELALPSKYVNFLYLASHYEKLKGSPED
NEQKQLFVEQHKHYLDEIIEQISEFSKRVILADANLDKVLSAYNKHRDKP
IREQAENIIHLFTLTNLGAPAAFKYFDTTIDRKRYTSTKEVLDATLIHQS
ITGLYETRIDLSQLGGDSGGSTNLSDIIEKETGKQLVIQESILMLPEEVE
EVIGNKPESDILVHTAYDESTDENVMLLTSDAPEYKPWALVIQDSNGENK
IKMLSGGSPKKKRKV

huAPOBEC3G (D316R_D317R)-XTEN-nCas9-UGI-NLS (mammalian construct) (SEQ ID NO: 163)

MDPPTFTFNFNNEPWVRGRHETYLCYEVERMHNDTWVLLNQRRGFLCNQA
PHKHGFLEGRHAELCFLDVIPFWKLDLDQDYRVTCFTSWSPCFSCAQEMA
KFISKNKHVSLCIFTARIYRRQGRCQEGLRTLAEAGAKISIMTYSEFKHC
WDTFVDHQGCPFQPWDGLDEHSQDLSGRLRAILQSGSETPGTSESATPES
DKKYSIGLAIGTNSVGWAVITDEYKVPSKKFKVLGNTDRHSIKKNLIGAL
LFDSGETAEATRLKRTARRRYTRRKNRICYLQEIFSNEMAKVDDSFFHRL
EESFLVEEDKKHERHPIFGNIVDEVAYHEKYPTIYHLRKKLVDSTDKADL
RLIYLALAHMIKFRGHFLIEGDLNPDNSDVDKLFIQLVQTYNQLFEENPI
NASGVDAKAILSARLSKSRRLENLIAQLPGEKKNGLFGNLIALSLGLTPN
FKSNFDLAEDAKLQLSKDTYDDDLDNLLAQIGDQYADLFLAAKNLSDAIL
LSDILRVNTEITKAPLSASMIKRYDEHHQDLTLLKALVRQQLPEKYKEIF
FDQSKNGYAGYIDGGASQEEFYKFIKPILEKMDGTEELLVKLNREDLLRK
QRTFDNGSIPHQIHLGELHAILRRQEDFYPFLKDNREKIEKILTFRIPYY
VGPLARGNSRFAWMTRKSEETITPWNFEEVVDKGASAQSFIERMTNFDKN
LPNEKVLPKHSLLYEYFTVYNELTKVKYVTEGMRKPAFLSGEQKKAIVDL
LFKTNRKVTVKQLKEDYFKKIECFDSVEISGVEDRFNASLGTYHDLLKII
KDKDFLDNEENEDILEDIVLTLTLFEDREMIEERLKTYAHLFDDKVMKQL
KRRRYTGWGRLSRKLINGIRDKQSGKTILDFLKSDGFANRNFMQLIHDDS
LTFKEDIQKAQVSGQGDSLHEHIANLAGSPAIKKGILQTVKVVDELVKVM
GRHKPENIVIEMARENQTTQKGQKNSRERMKRIEEGIKELGSQILKEHPV
ENTQLQNEKLYLYYLQNGRDMYVDQELDINRLSDYDVDHIVPQSFLKDDS
IDNKVLTRSDKNRGKSDNVPSEEVVKKMKNYWRQLLNAKLITQRKFDNLT
KAERGGLSELDKAGFIKRQLVETRQITKHVAQILDSRMNTKYDENDKLIR
EVKVITLKSKLVSDFRKDFQFYKVREINNYHHAHDAYLNAVVGTALIKKY
PKLESEFVYGDYKVYDVRKMIAKSEQEIGKATAKYFFYSNIMNFFKTEIT
LANGEIRKRPLIETNGETGEIVWDKGRDFATVRKVLSMPQVNIVKKTEVQ
TGGFSKESILPKRNSDKLIARKKDWDPKKYGGFDSPTVAYSVLVVAKVEK
GKSKKLKSVKELLGITIMERSSFEKNPIDFLEAKGYKEVKKDLIIKLPKY
SLFELENGRKRMLASAGELQKGNELALPSKYVNFLYLASHYEKLKGSPED
NEQKQLFVEQHKHYLDEIIEQISEFSKRVILADANLDKVLSAYNKHRDKP
IREQAENIIHLFTLTNLGAPAAFKYFDTTIDRKRYTSTKEVLDATLIHQS
ITGLYETRIDLSQLGGDSGGSTNLSDIIEKETGKQLVIQESILMLPEEVE
EVIGNKPESDILVHTAYDESTDENVMLLTSDAPEYKPWALVIQDSNGENK
IKMLSGGSPKKKRKV

[0505] Base Calling Matlab Script

(SEQ ID NO: 164)
WTnuc = ‘GCGGACATGGAGGACGTGCGCGGCCGCCTGGTGCAGTACCG
CGGCGAGGTGCAGGCCATGCTCGGCCAGA
GCACCGAGGAGCTGCGGGTGCGCCTCGCCTCCCACCTGCGCAAGCTGCGT
AAGCGGCTCCTCCGCGATGCCGATGACCTGCAGAAGCGCCTGGCAGTGTA
CCAGGCCGGGGCCCGCGAGGGCGCCGAGCGCGGCCTCAGCGCCATCCGCG
AGCGCCTGGGGCCCCTGGTGGAACAG’;

%cycle through fastq files for different samples files=dir(‘*.fastq’);
for d=1:20
filename=files(d).name;
%read fastq file
[header,seqs,qscore]=fastqread(filename);

| | |
|---|---|
| seqsLength = length(seqs); | % number of sequences seqsFile= |
| strrep(filename,‘.fastq’,‘’); | % trims off .fastq |

%create a directory with the same name as fastq file ifexist(seqsFile,‘dir’);
error(‘Directory already exists. Please rename or move it before moving on.’);
end

| | |
|---|---|
| mkdir(seqsFile); | % make directory |

| | |
|---|---|
| wtLength = length(WTnuc); | % length of wildtype sequence |

%% aligning back to the wildtype nucleotide sequence
%
% AlN is a matrix of the nucleotide alignment window=1:wtLength;

| | |
|---|---|
| sBLength = length(seqs); | % number of sequences |

% counts number of skips nSkips = 0;
ALN=repmat(‘’,[sBLengthwtLength]);
% iterate through each sequencing read for i = 1:sBLength
%If you only have forward read fastq files leave as is
%If you have R1 foward and R2 is reverse fastq files uncomment the
%next four lines of code and the subsequent end statement

| | |
|---|---|
| % | ifmod(d,2)==0; |

| | |
|---|---|
| % | reverse=seqrcomplement(seqs{i}); |
| % | [score,alignment,start]= |

swalign(reverse,WTnuc,‘Alphabet’,‘NT’);

| | |
|---|---|
| % | else |

[score,alignment,start]=swalign(seqs{i},WTnuc,‘Alphabet’,‘NT’);

| | |
|---|---|
| % | end |

% length of the sequencing read len=
length(alignment(3,:));
% if there is a gap in the alignment, skip = 1 and we will
% throw away the entire read skip = 0;
for j = 1:len
if (alignment(3,j) == ‘-’ || alignment(1,j) == ‘-’) skip = 1;

break;

end
%in addition if the qscore for any given base in the read is
%below 31 the nucleotide is turned into an N (fastq qscores that are not letters)
ifisletter(qscore{i}(start(1)+j−1)) else
alignment(1,j) = ‘N’;
end
end
if skip == 0 && len>10
ALN(i, start(2):(start(2)+length(alignment)−1))=alignment(1,:);
end
end
% with the alignment matrices we can simply tally up the occurrences of
% each nucleotide at each column in the alignment these
% tallies ignore bases annotated as N
% due to low qscores
TallyNTD=zeros(5,wtLength); fori=1:wtLength
TallyNTD(:,i)=[sum(ALN(:,i)==‘A’),sum(ALN(:,i)==‘C’),sum(ALN(:,i)==‘G’),sum(ALN
(:,i)==‘T’),sum(ALN(:,i)==‘N’)];
end
% we then save these tally matrices in the respective folder for
% further processing
save(strcat(seqsFile,‘/TallyNTD’),‘TallyNTD’); dlmwrite(strcat(seqsFile,‘/TallyNTD.txt’),TallyNTD,‘precision’,
‘%.3f’, ‘newline’, ‘pc’); end

[0506] INDEL Detection Matlab Script

(SEQ ID NO: 164)
WTnuc = ‘GCGGACATGGAGGACGTGCGCGGCCGCCTGGTGCAGTACCGC
GGCGAGGTGCAGGCCATGCTCGGCCAGA
GCACCGAGGAGCTGCGGGTGCGCCTCGCCTCCCACCTGCGCAAGCTGCGT
AAGCGGCTCCTCCGCGATGCCGATGACCTGCAGAAGCGCCTGGCAGTGTA
CCAGGCCGGGGCCCGCGAGGGCGCCGAGCGCGGCCTCAGCGCCATCCGCG
AGCGCCTGGGGCCCCTGGTGGAACAG’;

%cycle through fastq files for different samples files=dir(‘*.fastq’);
%specify start and width of indel window as well as length of each flank indelstart=154;
width=30; flank=10;
for d=1:3
filename=files(d).name;
%read fastq file
[header,seqs,qscore]=fastqread(filename);

| | |
|---|---|
| seqsLength=length(seqs); | % number of sequences seqsFile |

=strcat(strrep(filename,‘fastq’,‘’),‘_INDELS’);
%create a directory with the same name as fastq file+_INDELS ifexist(seqsFile,‘dir’);
error(‘Directory already exists. Please rename or move it before moving on.’);
end

| | |
|---|---|
| mkdir(seqsFile); | % make directory |
| wtLength = length(WTnuc); | % length of wildtype sequence sBLength = |
| length(seqs); | % number of sequences |

```
% initialize counters and cell arrays
nSkips = 0; notINDEL=0;
ins={ };
dels={ }; NumIns=0;
NumDels=0;
% iterate through each sequencing read for i = 1:sBLength
%search for 10BP sequences that should flank both sides of the “INDEL WINDOW”
windowstart=strfind(seqs{i},WTnuc(indelstart-flank:indelstart));
          windowend=strfind(seqs{i},WTnuc(indelstart+width:indelstart+width+flank
));
%if the flanks are found proceed
iflength(windowstart)==1 && length(windowend)==1
%if the sequence length matches the INDEL window length save as
%not INDEL
if windowend-windowstart==width+flank notINDEL=notINDEL+1;
%if the sequence is two or more bases longer than the INDEL
%window length save as an Insertion
elseif windowend-windowstart>=width+flank+2 NumIns=NumIns+1;
ins{NumIns}=seqs{i};
%if the sequence is two or more bases shorter than the INDEL
%window length save as a Deletion
elseif windowend-windowstart<=width+flank-2 NumDels=NumDels+1;
dels{NumDels}=seqs{i};
%keep track of skipped sequences that are either one base
%shorter or longer than the INDEL window width else
nSkips=nSkips+1;
end
%keep track of skipped sequences that do not possess matching flank
%sequences else
nSkips=nSkips+1;
      end
end
fid=fopen(strcat(seqsFile,‘/summary.txt’),‘wt’);
fprintf(fid, ‘Skipped reads %i\n not INDEL %i\n Insertions %i\n Deletions
%i\n’, [nSkips, notINDEL, NumIns, NumDels]); fclose(fid);
save(strcat(seqsFile,‘/nSkips’),‘nSkips’); save(strcat(seqsFile,‘/notINDEL’),‘notINDEL’);
save(strcat(seqsFile,‘/NumIns’),‘NumIns’); save(strcat(seqsFile,‘/NumDels’),‘NumDels’);
save(strcat(seqsFile,‘/dels’),‘dels’);
C = dels;
fid = fopen(strcat(seqsFile, ‘/dels.txt’), ‘wt’); fprintf(fid, ‘“%s”\n’, C{:});
fclose(fid);
save(strcat(seqsFile,‘/ins’),‘ins’); C = ins;
fid = fopen(strcat(seqsFile, ‘/ins.txt’), ‘wt’); fprintf(fid, ‘“%s”\n’, C{:});
fclose(fid);
end
```

### Example 5: Cas9 Variant Sequences

[0507] The disclosure provides Cas9 variants, for example Cas9 proteins from one or more organisms, which may comprise one or more mutations (e.g., to generate dCas9 or Cas9 nickase). In some embodiments, one or more of the amino acid residues, identified below by an asterek, of a Cas9 protein may be mutated. In some embodiments, the D10 and/or H840 residues of the amino acid sequence provided in SEQ ID NO: 6, or a corresponding mutation in any Cas9 protein, such as any one of the Cas9 amino acid sequences as provided herein, are mutated. In some embodiments, the D10 residue of the amino acid sequence provided in SEQ ID NO: 6, or a corresponding mutation in any Cas9 protein, such as any one of the Cas9 amino acid sequences as provided herein, is mutated to any amino acid residue, except for D. In some embodiments, the D10 residue of the amino acid sequence provided in SEQ ID NO: 6, or a corresponding mutation in any Cas9 protein, such as any one of the Cas9 amino acid sequences as provided herein, is mutated to an A. In some embodiments, the H840 residue of the amino acid sequence provided in SEQ ID NO: 6, or a corresponding residue in any Cas9 protein, such as any one of the Cas9 amino acid sequences as provided herein, is an H. In some embodiments, the H840 residue of the amino acid sequence provided in SEQ ID NO: 6, or a corresponding mutation in any Cas9 protein, such as any one of the Cas9 amino acid sequences as provided herein, is mutated to any amino acid residue, except for H. In some embodiments, the H840 residue of the amino acid sequence provided in SEQ ID NO: 6, or a corresponding mutation in any Cas9 protein, such as any one of the Cas9 amino acid sequences as provided herein, is mutated to an A. In some embodiments, the D10 residue of the amino acid sequence provided in SEQ ID NO: 6, or a corresponding residue in any Cas9 protein, such as any one of the Cas9 amino acid sequences as provided herein, is a D.

[0508] A number of Cas9 sequences from various species were aligned to determine whether corresponding homologous amino acid residues of D10 and H840 of SEQ ID NO: 6 or SEQ ID NO: 567 can be identified in other Cas9 proteins, allowing the generation of Cas9 variants with corresponding mutations of the homologous amino acid residues. The alignment was carried out using the NCBI Constraint-based Multiple Alignment Tool (COBALT(accessible at st-va.ncbi.nlm.nih.gov/tools/cobalt), with the following parameters. Alignment parameters: Gap penalties −11,−1; End-Gap penalties −5,−1. CDD Parameters: Use RPS BLAST on; Blast E-value 0.003; Find Conserved columns and Recompute on. Query Clustering Parameters: Use query clusters on; Word Size 4; Max cluster distance 0.8; Alphabet Regular.

[0509] An exemplary alignment of four Cas9 sequences is provided below. The Cas9 sequences in the alignment are: Sequence 1 (S1): SEQ ID NO: 567|WP_0109222511 gi 499224711|type II CRISPR RNA-guided endonuclease Cas9 [Streptococcus pyogenes]; Sequence 2 (S2): SEQ ID NO: 568|WP_039695303|gi 746743737 I type II CRISPR RNA-guided endonuclease Cas9 [Streptococcus gallolyticus]; Sequence 3 (S3): SEQ ID NO: 569|WP_045635197|gi 782887988|type II CRISPR RNA-guided endonuclease Cas9 [Streptococcus mitis]; Sequence 4 (S4): SEQ ID NO: 57015AXW_A|gi 924443546| Staphylococcus aureus Cas9. The HNH domain (bold and underlined) and the RuvC domain (boxed) are identified for each of the four sequences. Amino acid residues 10 and 840 in S1 and the homologous amino acids in the aligned sequences are identified with an asterisk following the respective amino acid residue.

| | | | |
|---|---|---|---|
| S1 | 1 | --MDKK-YSIGLD*IGTNSVGWAVITDEYKVPSKKFKVLGNTDRHSIKKNLI--GALLEDSG--ETAEATRLKRTARRRYT | 73 |
| S2 | 1 | --MTKKNYSIGLD*IGTNSVGWAVITDDYKVPAKKMKVLGNTDKKYIKKNLL--GALLFDSG--ETAEATRLKRTARRRYT | 74 |
| S3 | 1 | --M-KKGYSIGLD*IGTNSVGFAVITDDYKVPSKKMKVLGNTDKRFIKKNLI--GALLFDEG--TTAEARRLKRTARRRYT | 73 |
| S4 | 1 | GSHMKRNYILGLD*IGITSVGYGII--DYET-----------------RDVIDAGVRLFKEANVENNEGRRSKRGARRLKR | 61 |
| S1 | 74 | RRKNRICYLQEIFSNEMAKVDDSFEHRLEESELVEEDKKHERHPIEGNIVDEVAYHEKYPTIYHLRKKLVDSTDKADLRL | 153 |
| S2 | 75 | RRKNRLRYLQEIFANETAKVDESFFQRLDESFLTDDDKTEDSHPIEGNKAEEDAYHQKFPTIYHLRKHLADSSEKADLRL | 154 |
| S3 | 74 | RRKNRLRYLQEIFSEEMSKVDSSFEHRLDDSFLIPEDKRESKYPIFATLTEEKEYHKQFPTIYHLRKQLADSKEKTDLRL | 153 |
| S4 | 62 | RRRHRIQRVKKLL--------------FDYNLLTD--------------------HSELSGINPYEARVKGLSQKLSEEE | 107 |
| S1 | 154 | IYLALAHMIKERGHFLIEGDLNPDNSDVDKLFIQLVQTYNQLFEENPINASGVDAKAILSARLSKSRRLENLIAQLPGEK | 233 |
| S2 | 155 | VYLALAHMIKFRGHFLIEGELNAENTDVQKIFADFVGVYNRTFDDSHLSEITVDVASILTEKISKSRRLENLIKYYPTEK | 234 |
| S3 | 154 | IYLALAHMIKYRGHFLYEEAFDIKNNDIQKIFNEFISIYDNTFEGSSLSGQNAQVEAIFTDKISKSAKRERVLKLEPDEK | 233 |
| S4 | 108 | FSAALLHLAKRRG----------------------VHNVNEVEEDT---------------------------------- | 131 |
| S1 | 234 | KNGLFGNLIALSLGLTPNEKSNFDLAEDAKLQLSKDTYDDDLDNLLAQIGDQYADLFLAAKNLSDAILLSDILRVNTEIT | 313 |
| S2 | 235 | KNTLFGNLIALALGLQPNEKTNFKLSEDAKLQFSKDTYEEDLEELLGKIGDDYADLFTSAKNLYDAILLSGILTVDDNST | 314 |
| S3 | 234 | STGLFSEFLKLIVGNQADFKKHFDLEDKAPLQFSKDTYDEDLENLLGQIGDDFTDLFVSAKKLYDAILLSGILTVTDPST | 313 |
| S4 | 132 | -----GNELS------------------TKEQISRN-------------------------------------------- | 144 |
| S1 | 314 | KAPLSASMIKRYDEHHQDLTLLKALVRQQLPEKYKEIFFDQSKNGYAGYIDGGASQEEFYKFIKPILEKM--DGTEELLV | 391 |
| S2 | 315 | KAPLSASMIKRYVEHHEDLEKLKEFIKANKSELYHDIFKDKNKNGYAGYIENGVKQDEFYKYLKNILSKIKIDGSDYFLD | 394 |
| S3 | 314 | KAPLSASMIERYENHQNDLAALKQFIKNNLPEKYDEVFSDQSKDGYAGYIDGKTTQETFYKYIKNLLSKF--EGTDYFLD | 391 |
| S4 | 145 | ----SKALEEKYVAELQ-------------------------------------------------LERLKKDG------ | 165 |
| S1 | 392 | KLNREDLLRKQRTFDNGSIPHQIHLGELHAILRRQEDFYPFLKDNREKIEKILTFRIPYYVGPLARGNSRFAWMTRKSEE | 471 |
| S2 | 395 | KIEREDFLRKQRTFDNGSIPHQIHLQEMHAILRRQGDYYPFLKEKQDRIEKILTFRIPYYVGPLVRKDSRFAWAEYRSDE | 474 |
| S3 | 392 | KIEREDFLRKQRTFDNGSIPHQIHLQEMNAILRRQGEYYPFLKDNKEKIEKILTFRIPYYVGPLARGNRDFAWLTRNSDE | 471 |
| S4 | 166 | --EVRGSINRFKTSD--------YVKEAKQLLKVQKAYHQLDQSFIDTYIDLLETRRTYYEGP--GEGSPFGW------K | 227 |
| S1 | 472 | TITPWNFEEVVDKGASAQSFIERMTNFDKNLPNEKVLPKHSLLYEYFTVYNELTKVKYVTEGMRKPAFLSGEQKKAIVDL | 551 |
| S2 | 475 | KITPWNFDKVIDKEKSAEKFITRMTLNDLYLPEEKVLPKHSHVYETYAVYNELTKIKYVNEQGKE-SFFDSNMKQEIFDH | 553 |
| S3 | 472 | AIRPWNFEEIVDKASSAEDFINKMTNYDLYLPEEKVLPKHSLLYETFAVYNELTKVKFIAEGLRDYQFLDSGQKKQIVNQ | 551 |
| S4 | 228 | DIKEW---------------YEMLMGHCTYFPEELRSVKYAYNADLYNALNDLNNLVITRDENEK---LEYYEKFQIIEN | 289 |
| S1 | 552 | LEKTNRKVTVKQLKEDYFKKIECFDSVEISGVEDR---FNASLGTYHDLLKIIKDKDFLDNEENEDILEDIVLTLTLFED | 628 |
| S2 | 554 | VFKENRKVTKEKLLNYLNKEFPEYRIKDLIGLDKENKSFNASLGTYHDLKKIL-DKAFLDDKVNEEVIEDIIKTLTLFED | 632 |
| S3 | 552 | LEKENRKVTEKDIIHYLHN-VDGYDGIELKGIEKQ---FNASLSTYHDLLKIIKDKEEMDDAKNEAILENIVHTLTIFED | 627 |
| S4 | 290 | VFKQKKKPTLKQIAKEILVNEEDIKGYRVTSTGKPEF---TNLKVYHDIKDITARKEII---ENAELLDQIAKILTIYQS | 363 |
| S1 | 629 | REMIEERLKTYAHLFDDKVMKQLKR-RRYTGWGRLSRKLINGIRDKQSGKTILDFLKSDGFANRNFMQLIHDDSLTFKED | 707 |
| S2 | 633 | KDMIHERLQKYSDIFTANQLKKLER-RHYTGWGRLSYKLINGIRNKENNKTILDYLIDDGSANRNFMQLINDDTLPFKQI | 711 |
| S3 | 628 | REMIKQRLAQYDSLFDEKVIKALTR-RHYTGWGKLSAKLINGICDKQTGNTILDYLIDDGKINRNFMQLINDDGLSFKEI | 706 |
| S4 | 364 | SEDIQEELTNLNSELTQEEIEQISNLKGYTGTHNLSLKAINLILDE------LWHTNDNQIAIFNRLKLVP--------- | 428 |
| S1 | 708 | [chemical structure] | 781 |
| S2 | 712 | [chemical structure] | 784 |
| S3 | 707 | [chemical structure] | 779 |
| S4 | 429 | [chemical structure] | 505 |
| S1 | 782 | KRIEEGIKELGSQIL-------KEHPVENTQLQNEKLYLYYLQNGRDMYVDQELDINRLSD----YDVDH*IVPQSFLKDD | 850 |
| S2 | 785 | KKLQNSLKELGSNILNEEKPSYIEDKVENSHLQNDQLFLYYIQNGKDMYTGDELDIDHLSD----YDIDH*IIPQAFIKDD | 860 |
| S3 | 780 | KRIEDSLKILASGL---DSNILKENPTDNNQLQNDRLFLYYLQNGKDMYTGEALDINQLSS----YDIDH*IIPQAFIKDD | 852 |
| S4 | 506 | ERIEEIIRTTGK---------------ENAKYLIEKIKLHDMQEGKCLYSLEAIPLEDLLNNPFNYEVDH*IIPRSVSFDN | 570 |
| S1 | 851 | [chemical structure] | 922 |
| S2 | 861 | [chemical structure] | 932 |
| S3 | 853 | [chemical structure] | 924 |
| S4 | 571 | [chemical structure] | 650 |
| S1 | 923 | [chemical structure] | 1002 |
| S2 | 933 | [chemical structure] | 1012 |
| S3 | 925 | [chemical structure] | 1004 |
| S4 | 651 | [chemical structure] | 712 |
| S1 | 1003 | [chemical structure] | 1077 |
| S2 | 1013 | [chemical structure] | 1083 |
| S3 | 1005 | [chemical structure] | 1081 |
| S4 | 713 | [chemical structure] | 764 |
| S1 | 1078 | [chemical structure] | 1149 |
| S2 | 1084 | [chemical structure] | 1158 |
| S3 | 1082 | [chemical structure] | 1156 |
| S4 | 765 | [chemical structure] | 835 |
| S1 | 1150 | EKGKSKKLKSVKELLGITIMERSSFEKNPI-DFLEAKG-----YKEVKKDLIIKLPKYSLFELENGRKRMLASAGELQKG | 1223 |
| S2 | 1159 | EKGKAKKLKTVKELVGISIMERSFFEENPV-EFLENKG-----YHNIREDKLIKLPKYSLFEFEGGRRRLLASASELQKG | 1232 |
| S3 | 1157 | EKGKAKKLKTVKTLVGITIMEKAAFEENPI-TFLENKG-----YHNVRKENILCLPKYSLFELENGRRRLLASAKELQKG | 1230 |
| S4 | 836 | DPQTYQKLK--------LIMEQYGDEKNPLYKYYEETGNYLTKYSKKDNGPVIKKIKYYGNKLNAHLDITDDYPNSRNKV | 907 |
| S1 | 1224 | NELALPSKYVNFLYLASHYEKLKGSPEDNEQKQLFVEQHKHYLDEITEQISEFSKRVILADANLDKVLSAYNKH------ | 1297 |
| S2 | 1233 | NEMVLPGYLVELLYHAHRADNF-----NSTEYLNYVSEHKKEFEKVLSCVEDFANLYVDVEKNLSKIRAVADSM------ | 1301 |
| S3 | 1231 | NEIVLPVYLTTLLYHSKNVHKL-----DEPGHLEYIQKHRNEFKDLLNLVSEFSQKYVLADANLEKIKSLYADN------ | 1299 |
| S4 | 908 | VKLSLKPYRFD-VYLDNGVYKFV-----TVKNLDVIK--KENYYEVNSKAYEEAKKLKKISNQAEFIASFYNNDLIKING | 979 |
| S1 | 1298 | RDKPIREQAENITHLFTLTNLGAPAAFKYFDTTIDRKRYTSTKEVLDATLIHQSIT--------GLYETRI----DLSQL | 1365 |
| S2 | 1302 | DNFSIEEISNSFINLLTLTALGAPADFNFLGEKIPRKRYTSTKECLNATLIHQSIT--------GLYETRI----DLSKL | 1369 |
| S3 | 1300 | EQADIEILANSFINLLTFTALGAPAAFKFFGKDIDRKRYTTVSEILNATLIHQSIT--------GLYETWI----DLSKL | 1367 |
| S4 | 980 | ELYRVIGVNNDLLNRIEVNMIDITYR-EYLENMNDKRPPRIIKTIASKT---QSIKKYSTDILGNLYEVKSKKHPQIIKK | 1055 |
| S1 | 1366 | GGD | 1368 |
| S2 | 1370 | GEE | 1372 |
| S3 | 1368 | GED | 1370 |
| S4 | 1056 | G-- | 1056 |

[0510] The alignment demonstrates that amino acid sequences and amino acid residues that are homologous to a reference Cas9 amino acid sequence or amino acid residue can be identified across Cas9 sequence variants, including, but not limited to Cas9 sequences from different species, by identifying the amino acid sequence or residue that aligns with the reference sequence or the reference residue using alignment programs and algorithms known in the art. This disclosure provides Cas9 variants in which one or more of the amino acid residues identified by an asterisk in SEQ ID NOs: 567-570 (e.g., 51, S2, S3, and S4, respectively) are mutated as described herein. The residues D10 and H840 in Cas9 of SEQ ID NO: 6 that correspond to the residues identified in SEQ ID NOs: 567-570 by an asterisk are referred to herein as “homologous” or “corresponding” residues. Such homologous residues can be identified by sequence alignment, e.g., as described above, and by identifying the sequence or residue that aligns with the reference sequence or residue. Similarly, mutations in Cas9 sequences that correspond to mutations identified in SEQ ID NO: 6 herein, e.g., mutations of residues 10, and 840 in SEQ ID NO: 6, are referred to herein as “homologous” or “corresponding” mutations. For example, the mutations corresponding to the D10A mutation in SEQ ID NO: 6 or 51 (SEQ ID NO: 567) for the four aligned sequences above are D11A for S2, D10A for S3, and D13A for S4; the corresponding mutations for H840A in SEQ ID NO: 6 or 51 (SEQ ID NO: 567) are H850A for S2, H842A for S3, and H560A for S4.

### Example 6: Next Generation C to T Editors

[0511] Other familes of cytidine deaminases as alternatives to base editor 3 (BE3) constructs were examined. The different C to T editors were developed to have a narrow or different editing window, alternate sequence specificity to expand targetable substrates, and to have higher activity.

[0512] Using the methods described in Example 4, the pmCDA1 (cytidine deaminase 1 from Petromyzon marinus) activity at the HeK-3 site is evaluated (FIG. 42). The pmCDA1-nCas9-UGI-NLS (nCas9 indicates the Cas9 nickase described herein) construct is active on some sites (e.g., the C bases on the complementary strand at position 9, 5, 4, and 3) that are not accessible with rAPOBEC1 (BE3).

[0513] The pmCDA1 activity at the HeK-2 site is given in FIG. 43. The pmCDA1-XTEN-nCas9-UGI-NLS construct is active on sites adjacent to “G,” while rAPOBEC1 analog (BE3 construct) has low activity on “C”s that are adjacent to “G”s, e.g., the C base at position 11 on the complementary strand.

[0514] The percent of total sequencing reads with target C converted to T (FIG. 44), C converted to A (FIG. 45), and C converted to G (FIG. 46) are shown for CDA and APOBEC1 (the BE3 construct).

[0515] The huAPOBEC3G activity at the HeK-2 site is shown in FIG. 47. Two constructs were used: huAPOBEC3G-XTEN-nCas9-UGI-NLS and huAPOBEC3G*(D316R_D317R)-XTEN-nCas9-UGI-NLS. The huAPOBEC3G-XTEN-nCas9-UGI-NLS construct has different sequence specificity than rAPOBEC1 (BE3), as shown in FIG. 47, the editing window appears narrow, as indicated by APOBEC3G's descreased activity at position 4 compared to APOBEC1. Mutations made in huAPOBEC3G (D316R and D317R) increased ssDNA binding and resulted in an observable effect on expanding the sites which were edited (compare APOBEC3G with APOBEC3G RR in FIG. 47). Mutations were chosen based on APOBEC3G crystal structure, see: Holden et al., Crystal structure of the anti-viral APOBEC3G catalytic domain and functional implication. Nature. (2008); 121-4, the entire contents of which are incorporated herein by reference.

### Example 7: pmCDA1/huAPOBEC3G/rAPOBEC1 Work in E. coli

[0516] LacZ selection optimization for the A to I conversion was performed using a bacterial strain with lacZ encoded on the F plasmid. A critical glutamic acid residue was mutated (e.g., GAG to GGG, Glu to Gly mutation) so that G to A by a cytidine deaminase would restore lacZ activity (FIG. 48). Strain CC102 was selected for the selection assay. APOBEC1 and CDA constructs were used in a selection assay to optimize G to A conversion.

[0517] To evaluate the the effect of copy number of the plasmids encoding the deaminase constructs on lacZ reversion frequency, the CDA and APOBEC1 deaminases were cloned into 4 plasmids with different replication origins (hence different copy numbers), SC101, CloDF3, RSF1030, and PUC (copy number: PUC>RSF1030>CloDF3>SC101) and placed under an inducible promoter. The plasmids were individually transformed into E. coli cells harboring F plasmid containing the mutated LacZ gene. The expression of the deaminases were induced and LacZ activity was detected for each construct (FIG. 49). As shown in FIG. 49, CDA exhibited significantly higher activity than APOBEC1 in all instances, regardless of the plasmid copy number the deaminases were cloned in. Further, In terms of the copy number, the deaminase activity was positively correlated with the copy number of the plasmid they are cloned in, i.e., PUC>CloDF3>SC101.

[0518] LacZ reversions were confirmed by sequencing of the genomic DNA at the lacZ locus. To obtain the genomic DNA containing the corrected LacZ gene, cells were grown media containg X-gal, where cells having LacZ activity form blue colonies. Blue colonies were selected and grown in minimial media containing lactose. The cells were spun down, washed, and re-plated on minimal media plates (lactose). The blue colony at the highest dilution was then selected, and its genomic DNA was sequenced at the lacZ locus (FIG. 50).

[0519] A chloramphenicol reversion assay was designed to test the activity of different cytidine deaminases (e.g., CDA, and APOBEC1). A plasmid harboring a mutant CAT1 gene which confers chloramphenicol resistance to bacteria is constructed with RSF1030 as the replication origin. The mutant CAT1 gene encodings a CAT1 protein that has a H195R (CAC to CGC) mutation, rendering the protein inactive (FIG. 51). Deamination of the C base-paired to the G base in the CGC codon would convert the codon back to a CAC codon, restoring the activity of the protein. As shown in FIG. 52, CDA outperforms rAPOBEC in E. coli in restoring the acitivyt of the chloramphenicol reisitance gene. The minimum inhibitory concentration (MIC) of chlor in S1030 with the selection plasmid (pNMG_ch_5) was approximately 1 μg/mL. Both rAPOBEC-XTEN-dCas9-UGI and CDA-XTEN-dCas9-UGI induced DNA correction on the selection plasmid (FIG. 53).

[0520] Next, the huAPOBEC3G-XTEN-dCas9-UGI protein was tested in the same assay. Interestingly, huAPOBEC3G-XTEN-dCas9-UGI exhibited different sequence specificity than the rAPOBEC1-XTEN-dCas9-UGI fusion protein. Only position 8 was edited with APOBEC3G-XTEN-dCas9-UGI fusion, as compared to the rAPOBEC11-XTEN-dCas9-UGIfusion (in which positions 3, 6, and 8 were edited) (FIG. 54).

### Example 8: C to T Base Editors with Less Off Target Editing

[0521] Current base editing technologies allow for the sequence-specific conversion of a C:G base pair into a T:A base pair in genomic DNA. This is done via the direct catalytic conversion of cytosine to uracil by a cytidine deaminase enzyme and thus, unlike traditional genome editing technologies, does not introduce double-stranded DNA breaks (DSBs) into the DNA as a first step. See, Komor, A. C., Kim, Y. B., Packer, M. S., Zuris, J. A., and Liu, D. R. (2016), “Programmable editing of a target base in genomic DNA without double-stranded DNA cleavage.” Nature 533, 420-424; the entire contents of which are incorporated by reference herein. Instead, catalytically dead SpCas9 (dCas9) or a SpCas9 nickase (dCas9(A840H)) is tethered to a cytidine deaminase enzyme such as rAPOBEC1, pmCDA1, or hAPOBEC3G. The genomic locus of interest is encoded by an sgRNA, and DNA binding and local denaturation is facilitated by the dCas9 portion of the fusion. However, just as wt dCas9 and wt Cas9 exhibit off-target DNA binding and cleavage, current base editors also exhibit C to T editing at Cas9 off-target loci, which limits their therapeutic usefulness.

[0522] It has been reported that the introduction of just three to four mutations into SpCas9 that neutralize nonspecific electrostatic interactions between the protein and the sugar-phosphate backbone of its target DNA, increases the DNA binding specificity of SpCas9. See, Kleinstiver, B. P., Pattanayak, V., Prew, M.S., Tsai, S. Q., Nguyen, N. T., Zheng, Z., and Joung, J. K. (2016) “High-fidelity CRISPR-Cas9 nucleases with no detectable genome-wide off-target effects.” Nature 529, 490-495; and Slaymaker, I. M., Gao, L., Zetsche, B., Scott, D. A., Yan, W. X., and Zhang, F. (2015) “Rationally engineered Cas9 nucleases with improved specificity. Science 351, 84-88; the entire contents of each are hereby incorporated by reference herein. Four reported neutralizing mutations were therefore incorporated into the initially reported base editor BE3 (SEQ ID NO: 48), and found that off-target C to T editing of this enzyme is also drastically reduced (FIG. 55), with no decrease in on-target editing (FIG. 56).

[0523] As shown in FIG. 55, HEK293T cells were transfected with plasmids expressing BE3 or HF-BE3 and a sgRNA matching the EMX1 sequence using Lipofectamine 2000. Three days after transfection, genomic DNA was extracted, amplified by PCR, and analyzed by high-throughput DNA sequencing at the on-target locus, plus the top ten known Cas9 off-target loci for the EMX1 sgRNA, as previously determined by Joung and coworkers using the GUIDE-seq method. See Tsai, S. Q., Zheng, Z., Nguyen, N. T., Liebers, M., Topkar, V.V., Thapar, V., Wyvekens, N., Khayter, C., Iafrate, A. J., Le, L. P., et al. (2015) “GUIDE-seq enables genome-wide profiling of off-target cleavage by CRISPR-Cas nucleases.” Nat Biotech 33, 187-197; the entire contents of which are incorporated by reference herein. EMX1 off-target 5 locus did not amplify and is not shown. Sequences of the on-target and off-target protospacers and protospacer adjacent motifs (PAMs) are displayed (FIG. 55). Cellular C to T conversion percentages, defined as the percentage of total DNA sequencing reads with T at each position of an original C within the protospacer, are shown for BE3 and HF-BE3.

[0524] In FIG. 56, HEK293T cells were transfected with plasmids expressing BE3 or HF-BE3 and sgRNAs matching the genomic loci indicated using Lipofectamine 2000. Three days after transfection, genomic DNA was extracted, amplified by PCR, and analyzed by high-throughput DNA sequencing at the on-target loci. The percentage of total DNA sequencing reads with all four bases at the target Cs within each protospacer are shown for treatment with BE3 or HF-BE3 (FIG. 56). Frequencies of indel formation are shown as well.

[0525] Primary Protein Sequence of HF-BE3 (SEQ ID NO: 48):

MSSETGPVAVDPTLRRRIEPHEFEVFFDPRELRKETCLLYEINWGGRHSI
WRHTSQNTNKHVEVNFIEKFTTERYFCPNTRCSITWFLSWSPCGECSRAI
TEFLSRYPHVTLFIYIARLYHHADPRNRQGLRDLISSGVTIQIMTEQESG
YCWRNFVNYSPSNEAHWPRYPHLWVRLYVLELYCIILGLPPCLNILRRKQ
PQLTFFTIALQSCHYQRLPPHILWATGLKSGSETPGTSESATPESDKKYS
IGLAIGTNSVGWAVITDEYKVPSKKFKVLGNTDRHSIKKNLIGALLFDSG
ETAEATRLKRTARRRYTRRKNRICYLQEIFSNEMAKVDDSFFHRLEESFL
VEEDKKHERHPIFGNIVDEVAYHEKYPTIYHLRKKLVDSTDKADLRLIYL
ALAHMIKFRGHFLIEGDLNPDNSDVDKLFIQLVQTYNQLFEENPINASGV
DAKAILSARLSKSRRLENLIAQLPGEKKNGLFGNLIALSLGLTPNFKSNF
DLAEDAKLQLSKDTYDDDLDNLLAQIGDQYADLFLAAKNLSDAILLSDIL
RVNTEITKAPLSASMIKRYDEHHQDLTLLKALVRQQLPEKYKEIFFDQSK
NGYAGYIDGGASQEEFYKFIKPILEKMDGTEELLVKLNREDLLRKQRTFD
NGSIPHQIHLGELHAILRRQEDFYPFLKDNREKIEKILTFRIPYYVGPLA
RGNSRFAWMTRKSEETITPWNFEEVVDKGASAQSFIERMTAFDKNLPNEK
VLPKHSLLYEYFTVYNELTKVKYVTEGMRKPAFLSGEQKKAIVDLLFKTN
RKVTVKQLKEDYFKKIECFDSVEISGVEDRFNASLGTYHDLLKIIKDKDF
LDNEENEDILEDIVLTLTLFEDREMIEERLKTYAHLFDDKVMKQLKRRRY
TGWGALSRKLINGIRDKQSGKTILDFLKSDGFANRNFMALIHDDSLTFKE
DIQKAQVSGQGDSLHEHIANLAGSPAIKKGILQTVKVVDELVKVMGRHKP
ENIVIEMARENQTTQKGQKNSRERMKRIEEGIKELGSQILKEHPVENTQL
QNEKLYLYYLQNGRDMYVDQELDINRLSDYDVDHIVPQSFLKDDSIDNKV
LTRSDKNRGKSDNVPSEEVVKKMKNYWRQLLNAKLITQRKFDNLTKAERG
GLSELDKAGFIKRQLVETRAITKHVAQILDSRMNTKYDENDKLIREVKVI
TLKSKLVSDFRKDFQFYKVREINNYHHAHDAYLNAVVGTALIKKYPKLES
EFVYGDYKVYDVRKMIAKSEQEIGKATAKYFFYSNIMNFFKTEITLANGE
IRKRPLIETNGETGEIVWDKGRDFATVRKVLSMPQVNIVKKTEVQTGGFS
KESILPKRNSDKLIARKKDWDPKKYGGFDSPTVAYSVLVVAKVEKGKSKK
LKSVKELLGITIMERSSFEKNPIDFLEAKGYKEVKKDLIIKLPKYSLFEL
ENGRKRMLASAGELQKGNELALPSKYVNFLYLASHYEKLKGSPEDNEQKQ
LFVEQHKHYLDEIIEQISEFSKRVILADANLDKVLSAYNKHRDKPIREQA
ENIIHLFTLTNLGAPAAFKYFDTTIDRKRYTSTKEVLDATLIHQSITGLY
ETRIDLSQLGGDSGGSTNLSDIIEKETGKQLVIQESILMLPEEVEEVIGN
KPESDILVHTAYDESTDENVMLLTSDAPEYKPWALVIQDSNGENKIKMLS
GGSPKKKRKV

### Example 9: Development of Base Editors that Use Cas9 Variants and Modulation of the Base Editor Processivity to Increase the Target Range and Precision of the Base Editing Technology

[0526] Unlike traditional genome editing platforms, base editing technology allows precise single nucleotide changes in the DNA without inducing double-stranded breaks (DSBs). See, Komor, A. C. et al. Nature 533, 420-424 (2016). The current generation of base editor uses the NGG PAM exclusively. This limits its ability to edit desired bases within the genome, as the base editor needs to be placed at a precise location where the target base is placed within a 4-base region (the ‘deamination window’), approximately 15 bases upstream of the PAM. See, Komor, A. C. et al. Nature 533, 420-424 (2016). Moreover, due to the high processivity of cytidine deaminase, the base editor may convert all cytidines within its deamination window into thymidines, which could induce amino acid changes other than the one desired by the researcher. See, Komor, A. C. et al. Nature 533, 420-424 (2016).

Expanding the Scope of Base Editing Through the Development of Base Editors with Cas9 Variants

[0527] Cas9 homologs and other RNA-guided DNA binders that have different PAM specificities were incorporated into the base editor architecture. See, Kleinstiver, B. P. et al. Nature 523, 481-485 (2015); Kleinstiver, B. P. et al. Nature Biotechnology 33, 1293-1298 (2015); and Zetsche, B. et al. Cell 163, 759-771 (2015); the entire contents of each are incorporated by reference herein. Furthermore, innovations that have broadened the PAM specificities of various Cas9 proteins were also incorporated to expand the target reach of the base editor even more. See, Kleinstiver, B. P. et al. Nature 523, 481-485 (2015); and Kleinstiver, B. P. et al. Nature Biotechnology 33, 1293-1298 (2015). The current palette of base editors is summarized in Table 4.

TABLE 4
New base editors made from Cas9 Variants

| | | | Reference for |
|---|---|---|---|
| Species | PAM | Base Editor Name | Cas9 variant |
| S. pyogenes | . . . NGG | BE3 | Wild-type |
| | . . . NGA | VQR BE3 or | Kleinstiver, B. P. et al. |
| | | EQR BE3 | |
| | . . . NGCG | VRER BE3 | Kleinstiver, B. P. et al. |
| S. aureus | . . . NNGRRT | SaBE3 | Wild-type |
| | . . . NNNRRT | SaKKH BE3 | Kleinstiver, B. P. et al. |
| L. bacterium | TTTN . . . | dCpf1 BE2 | Zetsche, B. et al. |

Modulating Base Editor's Processivity Through Site-Directed Mutagenesis of rAPOBEC1

[0528] It was reasoned that the processivity of the base editor could be modulated by making point mutations in the deaminase enzyme. The incorporatation of mutations that slightly reduce the catalytic activity of deaminase in which the base editor could still catalyze on average one round of cytidine deamination but was unlikely to access and catalyze another deamination within the relevant timescale were pursued. In effect, the resulting base editor would have a narrower deamination window.

[0529] rAPOBEC1 mutations probed in this work are listed in Table 5. Some of the mutations resulted in slight apparent impairment of rAPOBEC1 catalysis, which manifested as preferential editing of one cytidine over another when multiple cytidines are found within the deamination window. Combining some of these mutations had an additive effect, allowing the base editor to discriminate substrate cytidines with higher stringency. Some of the double mutants and the triple mutant allowed selective editing of one cytidine among multiple cytidines that are right next to one another (FIG. 57).

TABLE 5
rAPOBEC1 Point Mutations Investigated

| rAPOBEC1 mutation | Corresponding mutation | |
|---|---|---|
| studied in this work | in APOBEC3G | Reference |
| H121R/H122R | D315R/D316R | Holden, L. G. et al. |
| R126A | R320A | Chen, K-M. et al. |
| R126E | R320E | Chen, K-M. et al. |
| R118A | R313A | Chen, K-M. et al. |
| W90A | W285A | Chen, K-M. et al. |
| W90Y | W285Y | |
| R132E | R326E | |

### Base Editor PAM Expansion and Processivity Modulation

[0530] The next generation of base editors were designed to expand editable cytidines in the genome by using other RNA-guided DNA binders (FIG. 58). Using a NGG PAM only allows for a single target within the “window” whereas the use of multiple different PAMs allows for Cas9 to be positioned anywhere to effect selective deamination. A variety of new base editors have been created from Cas9 variants (FIG. 59 and Table 4). Different PAM sites (NGA, FIG. 60; NGCG, FIG. 61; NNGRRT, FIG. 62; and NNHRRT, FIG. 63) were explored. Selective deamination was successfully achieved through kinetic modulation of cytidine deaminase point mutagenesis (FIG. 65 and Table 5).

[0531] The effect of various mutations on the deamination window was then investigated in cell culture using spacers with multiple cytidines (FIGS. 66 and 67).

[0532] Further, the effect of various mutations on different genomic sites with limited numbers of cytidines was examined (FIGS. 68 to 71). It was found that approximately one cytidine will be edited within the deamination windown in the spacer, while the rest of the cytidines will be left intact. Overall, the preference for editing is as follows: C₆>C₅>>C₇≈C₄.

### Base Editing Using Cpf1

[0533] Cpf1, a Cas9 homolog, can be obtained as AsCpf1, LbCpf1, or from any other species. Schematics of fusion constructs, including BE2 and BE3 equivalents, are shown in FIG. 73. The BE2 equivalent uses catalytically inactive Cpf2 enzyme (dCpf1) instead of Cas9, while the BE3 equivalent includes the Cpf1 mutant, which nicks the target strand. The bottom schematic depicts different fusion architectures to combine the two innovations illustrated above it (FIG. 73). The base editing results of HEK293T cell TTTN PAM sites using Cpf1 BE2 were examined with different spacers (FIGS. 64A to 64C). In some embodiments, Cpf1 may be used in place of a Cas9 domain in any of the base editors provided herein. In some embodiments, the Cpf1 is a protein that is at least 50%, 55%, 60%, 65%, 70%, 75%, 80%, 85%, 90%, 95%, 98%, 99%, or 99.5% identical to SEQ ID NO 9.

### Full Protein Sequence of Cpf1 (SEQ ID NO: 9):

MSIYQEFVNKYSLSKTLRFELIPQGKTLENIKARGLILDDEKRAKDYKKA
KQIIDKYHQFFIEEILSSVCISEDLLQNYSDVYFKLKKSDDDNLQKDFKS
AKDTIKKQISEYIKDSEKFKNLFNQNLIDAKKGQESDLILWLKQSKDNGI
ELFKANSDITDIDEALEIIKSFKGWTTYFKGFHENRKNVYSSNDIPTSII
YRIVDDNLPKFLENKAKYESLKDKAPEAINYEQIKKDLAEELTFDIDYKT
SEVNQRVFSLDEVFEIANFNNYLNQSGITKFNTIIGGKFVNGENTKRKGI
NEYINLYSQQINDKTLKKYKMSVLFKQILSDTESKSFVIDKLEDDSDVVT
TMQSFYEQIAAFKTVEEKSIKETLSLLFDDLKAQKLDLSKIYFKNDKSLT
DLSQQVFDDYSVIGTAVLEYITQQIAPKNLDNPSKKEQELIAKKTEKAKY
LSLETIKLALEEFNKHRDIDKQCRFEEILANFAAIPMIFDEIAQNKDNLA
QISIKYQNQGKKDLLQASAEDDVKAIKDLLDQTNNLLHKLKIFHISQSED
KANILDKDEHFYLVFEECYFELANIVPLYNKIRNYITQKPYSDEKFKLNF
ENSTLANGWDKNKEPDNTAILFIKDDKYYLGVMNKKNNKIFDDKAIKENK
GEGYKKIVYKLLPGANKMLPKVFFSAKSIKFYNPSEDILRIRNHSTHTKN
GSPQKGYEKFEFNIEDCRKFIDFYKQSISKHPEWKDFGFRFSDTQRYNSI
DEFYREVENQGYKLTFENISESYIDSVVNQGKLYLFQIYNKDFSAYSKGR
PNLHTLYWKALFDERNLQDVVYKLNGEAELFYRKQSIPKKITHPAKEAIA
NKNKDNPKKESVFEYDLIKDKRFTEDKFFFHCPITINFKSSGANKFNDEI
NLLLKEKANDVHILSIDRGERHLAYYTLVDGKGNIIKQDTFNIIGNDRMK
TNYHDKLAAIEKDRDSARKDWKKINNIKEMKEGYLSQVVHEIAKLVIEYN
AIVVFEDLNFGFKRGRFKVEKQVYQKLEKMLIEKLNYLVFKDNEFDKTGG
VLRAYQLTAPFETFKKMGKQTGIIYYVPAGFTSKICPVTGFVNQLYPKYE
SVSKSQEFFSKFDKICYNLDKGYFEFSFDYKNFGDKAAKGKWTIASFGSR
LINFRNSDKNHNWDTREVYPTKELEKLLKDYSIEYGHGECIKAAICGESD
KKFFAKLTSVLNTILQMRNSKTGTELDYLISPVADVNGNFFDSRQAPKNM
PQDADANGAYHIGLKGLMLLGRIKNNQEGKKLNLVIKNEEYFEFVQNRNN

### Example 10: Increased Fidelity of Base Editing

[0535] Examining the difference between plasmid delivery of BE3 and HF-BE3, it was found that the two edit on-target loci with comparable efficiency (FIGS. 74 and 75). However, HF-BE3 edited off-target loci much less than BE3, meaning that HF-BE3 has a much higher DNA specificity than BE3 (FIG. 76). Deaminase protein lipofection to HEK cells demonstrated that protein delivery of BE3 results in comparable on-target activity, but much better specificity, than plasmid DNA delivery of BE3. Using improved transfection procedures and better plasmids (n=2), the experiment used the following conditions: protein delivery was 125 nM Cas9:sgRNA complex, plasmid delivery was 750 ng BE3/HF-BE3 plasmid+250 ng sgRNA plasmid, and lipofection was with 1.5 μL of Lipofectamine 2000 per well. EMX-1 off target site 2 and FANCF off-target site 1 showed the most off-target editing with BE3, compared to all of the off-targets assayed (FIGS. 77 and 78), while HEK-3 showed no significant editing at off-targets for any of the delivery methods (FIG. 79). HEK-4 shows some C-to-G editing on at the on-target site, while its off-target sites 1, 3, and 4 showed the most off-target editing of all the assayed sites (FIG. 80).

### Delivery of BE3 Protein Via Micro-Injection to Zebrafish

[0536] TYR guide RNAs were tested in an in vitro assay for sgRNA activity (FIGS. 81 and 82). The % HTS reads shows how many C residues were converted to T residues during a 2 h incubation with purified BE3 protein and PCR of the resulting product. Experiments used an 80-mer synthetic DNA substate with the target deamination site in 60 bp of its genomic context. This is not the same as % edited DNA strands because only one strand was nicked, so the product is not amplified by PCR. The proportion of HTS reads edited is equal to x/(2−x), where x is the actual proportion of THS reads edited. For 60% editing, the actual proportion of bases edited is 75%. “Off target” is represents BE3 incubated with the same DNA substrate, while bound to an off-target sgRNA. It was found sgRNAs sgRH_13, sgHR_17, and possibly sgHR_16 appeared to be promising targets for in vivo injection experiments.

[0537] The delivery of BE3 protein in was tested in vivo in zebrafish. Zebrafish embryos (n=16-24) were injected with either scramled sgRNA, sgHR_13, sgHR_16, or sgHR_17 and purified BE3. Three embryos from each condition were analyzed independently (single embryo) and for each condition, all of the injected embryos were pooled and sequenced as a pool. The results are shown in FIGS. 83 to 85.

### Example 11: Uses of Base Editors to Treat Disease

[0538] Base editors or complexes provided herein (e.g., BE3) may be used to modify nucleic acids. For example, base editors may be used to change a cytosine to a thymine in a nucleic acid (e.g., DNA). Such changes may be made to, inter alia, alter the amino acid sequence of a protein, to destroy or create a start codon, to create a stop codon, to distupt splicing donors, to disrupt splicing acceptors or edit regulatory sequences. Examples of possible nucleotide changes are shown in FIG. 86.

[0539] Base editors or complexes provided herein (e.g., BE3) may be used to edit an isoform of Apolipoprotein E in a subject. For example, an Apolipoprotein E isoform may be edited to yield an isoform associated with a lower risk of developing Alzheimer's disease. Apolipoprotein E has four isoforms that differ at amino acids 112 and 158. APOE4 is the largest and most common genetic risk factor for late-onset Alzheimer's disease. Arginine residue 158 of APOE4, encoded by the nucleic acid sequence CGC, may be changed to a cysteine by using a base editor (e.g., BE3) to change the CGC nucleic acid sequence to TGC, which encodes cysteine at residue 158. This change yields an APOE3r isoform, which is associated with lower Alzheimer's disease risk. See FIG. 87.

[0540] It was tested whether base editor BE3 could be used to edit APOE4 to APOE3r in mouse astrocytes (FIG. 88). APOE 4 mouse astrocytes were nucleofected with Cas9+ template or BE3, targeting the nucleic acid encoding Arginine 158 of APOE4. The Cas9+ template yielded only 0.3% editing with 26% indels, while BE3 yielded 75% editing with 5% indels. Two additional base-edited cytosines are silent and do not yield changes to the amino acid sequence (FIG. 88).

[0541] Base editors or complexes provided herein may be used to treat prion protein diseases such as Creutzfeldt-Jakob disease and fatal familial insomnia, for example, by introducing mutations into a PRNP gene. Reverting PRNP mutations may not yield therapeutic results, and intels in PRNP may be pathogenic. Accordingly, it was tested whether PRNP could be mutated using base editors (e.g., BE3) to introduce a premature stop codon in the PRNP gene. BE3, associated with its guide RNA, was introduced into HEK cells or glioblastoma cells and was capable of editing the PRNP gene to change the encoded arginine at residue 37 to a stop codon. BE3 yielded 41% editing (FIG. 89).

[0542] Additional genes that may be edited include the following: APOE editing of Arg 112 and Arg 158 to treat increased Alzheimer's risk; APP editing of Ala 673 to decrease Alzheimer's risk; PRNP editing of Arg 37 to treat fatal familial insomnia and other prion protein diseases; DMD editing of the exons 23 and 51 splice sites to treat Duchenne muscular dystrophy; FTO editing of intron 1 to treat obesity risk; PDS editing of exon 8 to treat Pendred syndrome (genetic deafness); TMC1 editing of exon 8 to treat congenital hearing loss; CYBB editing of various patient-relevant mutations to treat chronic granulomatous disease. Additional diseases that may be treated using the base editors provided herein are shown in Table 6, below.

[0543] UGI also plays a key role. Knocking out UDG (which UGI inhibits) was shown to dramatically improve the cleanliness and efficiency of C to T base editing (FIG. 90). Furthermore, base editors with nickase and without UGI were shown to produce a mixture of outcomes, with very high indel rates (FIG. 91).

### Example 12: Expanding the Targeting Scope of Base Editing

[0544] Base editing is a new approach to genome editing that uses a fusion protein containing a catalytically defective Streptococcus pyogenes Cas9, a cytidine deaminase, and an inhibitor of base excision repair to induce programmable, single-nucleotide C→T (or G→A) changes in DNA without generating double-strand DNA breaks, without requiring a donor DNA template, and without inducing an excess of stochastic insertions and deletions¹. The development of five new C→T (or G→A) base editors that use natural and engineered Cas9 variants with different protospacer-adjacent motif (PAM) specificities to expand the number of sites that can be targeted by base editing by 2.5-fold are described herein. Additionally, new base editors containing mutated cytidine deaminase domains that narrow the width of the apparent editing window from approximately 5 nucleotides to 1 or 2 nucleotides were engineered, enabling the discrimination of neighboring C nucleotides that would previously be edited with comparable efficiency. Together, these developments substantially increase the targeting scope of base editing.

[0545] CRISPR-Cas9 nucleases have been widely used to mediate targeted genome editing. In most genome editing applications, Cas9 forms a complex with a single guide RNA (sgRNA) and induces a double-stranded DNA break (DSB) at the target site specified by the sgRNA sequence. Cells primarily respond to this DSB through the non-homologuous end-joining (NHEJ) repair pathway, which results in stochastic insertions or deletions (indels) that can cause frameshift mutations that disrupt the gene. In the presence of a donor DNA template with a high degree of homology to the sequences flanking the DSB, gene correction can be achieved through an alternative pathway known as homology directed repair (HDR).^{3,4} Unfortunately, under most non-perturbative conditions HDR is inefficient, dependent on cell state and cell type, and dominated by a larger frequency of indels.^{3,4} As most of the known genetic variations associated with human disease are point mutations⁵, methods that can more efficiently and cleanly make precise point mutations are needed.

[0546] Base editing, which enables targeted replacement of a C:G base pair with a T:A base pair in a programmable manner without inducing DSBs¹, has been recently described. Base editing uses a fusion protein between a catalytically inactivated (dCas9) or nickase form of Streptococcus pyogenes Cas9 (SpCas9), a cytidine deaminase such as APOBEC1, and an inhibitor of base excision repair such as uracil glycosylase inhibitor (UGI) to convert cytidines into uridines within a five-nucleotide window specified by the sgRNA.¹ The third-generation base editor, BE3, converts C:G base pairs to T:A base pairs, including disease-relevant point mutations, in a variety of cell lines with higher efficiency and lower indel frequency than what can be achieved using other genome editing methods¹. Subsequent studies have validated the deaminase-dCas9 fusion approach in a variety of settings^{6,7}.

[0547] Efficient editing by BE3 requires the presence of an NGG PAM that places the target C within a five-nucleotide window near the PAM-distal end of the protospacer (positions 4-8, counting the PAM as positions 21-23)¹. This PAM requirement substantially limits the number of sites in the human genome that can be efficiently targeted by BE3, as many sites of interest lack an NGG 13- to 17-nucleotides downstream of the target C. Moreover, the high activity and processivity of BE3 results in conversion of all Cs within the editing window to Ts, which can potentially introduce undesired changes to the target locus. Herein, new C:G to T:A base editors that address both of these limitations are described.

[0548] It was thought that any Cas9 homolog that binds DNA and forms an “R-loop” complex⁸ containing a single-stranded DNA bubble could in principle be converted into a base editor. These new base editors would expand the number of targetable loci by allowing non-NGG PAM sites to be edited. The Cas9 homolog from Staphylococcus aureus (SaCas9) is considerably smaller than SpCas9 (1053 vs. 1368 residues), can mediate efficient genome editing in mammalian cells, and requires an NNGRRT PAM⁹. SpCas9 was replaced with SaCas9 in BE3 to generate SaBE3 and transfected HEK293T cells with plasmids encoding SaBE3 and sgRNAs targeting six human genomic loci (FIGS. 92A and 92B). After 3 d, the genomic loci were subjected to high-throughput DNA sequencing (HTS) to quantify base editing efficiency. SaBE3 enabled C to T base editing of target Cs at a variety of genomic sites in human cells, with very high conversion efficiencies (approximately 50-75% of total DNA sequences converted from C to T, without enrichment for transfected cells) arising from targeting Cs at positions 6-11. The efficiency of SaBE3 on NNGRRT-containing target sites in general exceeded that of BE3 on NGG-containing target sites¹. Perhaps due to its higher average efficiency, SaBE3 can also result in detectable base editing at target Cs at positions outside of the canonical BE3 activity window (FIG. 92C). In comparison, BE3 showed significantly reduced editing under the same conditions (0-11%), in accordance with the known SpCas9 PAM preference (FIG. 106A)¹⁰. These data show that SaBE3 can facilitate very efficient base editing at sites not accessible to BE3.

[0549] The targeting range of base editors was further expanded by applying recently engineered Cas9 variants that expand or alter PAM specificities. Joung and coworkers recently reported three SpCas9 mutants that accept NGA (VQR-Cas9), NGAG (EQR-Cas9), or NGCG(VRER-Cas9) PAM sequences¹¹. In addition, Joung and coworkers engineered a SaCas9 variant containing three mutations (SaKKH-Cas9) that relax its PAM requirement to NNNRRT¹². The SpCas9 portion of BE3 was replaced with these four Cas9 variants to produce VQR-BE3, EQR-BE3, VRER-BE3, and SaKKH-BE3, which target NNNRRT, NGA, NGAG, and NGCG PAMs respectively. HEK293T cells were transfected with plasmids encoding these constructs and sgRNAs targeting six genomic loci for each new base editor, and measured C to T base conversions using HTS.

[0550] SaKKH-BE3 edited sites with NNNRRT PAMs with efficiencies up to 62% of treated, non-enriched cells (FIG. 92D). As expected, SaBE3 was unable to efficiently edit targets containing PAMs that were NNNHRRT (where H=A, C, or T) (FIG. 92D). VQR-BE3, EQR-BE3, and VRER-BE3 exhibited more modest, but still substantial base editing efficiencies of up to 50% of treated, non-enriched cells at genomic loci with the expected PAM requirements with an editing window similar to that of BE3 (FIGS. 92E and 92F). Base editing efficiencies of VQR-BE3, EQR-BE3, and VRER-BE3 in general closely paralleled the reported PAM requirements of the corresponding Cas9 nucleases; for example, EQR-BE3 was unable to efficiently edit targets containing NGAH PAM sequences (FIG. 92F). In contrast, BE3 was unable to edit sites with NGA or NGCG PAMs efficiently (0-3%), likely due to its PAM restrictions (FIG. 106B).

[0551] Collectively, the properties of SaBE3, SaKKH-BE3, VQR-BE3, EQR-BE3, and VRER-BE3 establish that base editors exhibit a modularity that facilitates their ability to exploit Cas9 homologs and engineered variants.

[0552] Next, base editors with altered activity window widths were developed. All Cs within the activity window of BE3 can be efficiently converted to Ts¹. The ability to modulate the width of this window would be useful in cases in which it is important to edit only a subset of Cs present in the BE3 activity window.

[0553] The length of the linker between APOBEC1 and dCas9 was previously observed to modulate the number of bases that are accessible by APOBEC1 in vitro¹. In HEK293T cells, however, varying the linker length did not significantly modulate the width of the editing window, suggesting that in the complex cellular milieu, the relative orientation and flexibility of dCas9 and the cytidine deaminase are not strongly determined by linker length (FIG. 96). Next, it was thought that truncating the 5′ end of the sgRNA might narrow the base editing window by reducing the length of single-stranded DNA accessible to the deaminase upon formation of the RNA-DNA heteroduplex. HEK293T cells were co-transfected with plasmids encoding BE3 and sgRNAs of different spacer lengths targeting a locus with multiple Cs in the editing window. No consistent changes in the width of base editing when using truncated sgRNAs with 17- to 19-base spacers were observed (FIGS. 95A to 95C). Truncating the sgRNA spacer to fewer than 17 bases resulted in large losses in activity (FIG. 95A).

[0554] As an alternative approach, it was thought that mutations to the deaminase domain might narrow the width of the editing window through multiple possible mechanisms. First, some mutations may alter substrate binding, the conformation of bound DNA, or substrate accessibility to the active site in ways that reduce tolerance for non-optimal presentation of a C to the deaminase active site. Second, because the high activity of APOBEC1 likely contributes to the deamination of multiple Cs per DNA binding event,^{1,13,14} mutations that reduce the catalytic efficiency of the deaminase domain of a base editor might prevent it from catalyzing successive rounds of deamination before dissociating from the DNA. Once any C:G to T:A editing event has taken place, the sgRNA no longer perfectly matches the target DNA sequence and re-binding of the base editor to the target locus should be less favorable. Both strategies were tested in an effort to discover new base editors that distinguish among multiple cytidines within the original editing window.

[0555] Given the absence of an available APOBEC1 structure, several mutations previously reported to modulate the catalytic activity of APOBEC3G, a cytidine deaminase from the same family that shares 42% sequence similarity of its active site-containing domain to that of APOBEC1, were identified¹⁵. Corresponding APOBEC1 mutations were incorporated into BE3 and evaluated their effect on base editing efficiency and editing window width in HEK293T cells at two C-rich genomic sites containing Cs at positions 3, 4, 5, 6, 8, 9, 10, 12, 13, and 14 (site A); or containing Cs at positions 5, 6, 7, 8, 9, 10, 11, and 13 (site B).

[0556] The APOBEC1 mutations R118A and W90A each led to dramatic loss of base editing efficiency (FIG. 97C). R132E led to a general decrease in editing efficiency but did not change the substantially narrow the shape of the editing window (FIG. 97C). In contrast, several mutations that narrowed the width of the editing window while maintaining substantial editing efficiency were found (FIGS. 93A and 97C). The “editing window width” was defined to represent the artificially calculated window width within which editing efficiency exceeds the half-maximal value for that target. The editing window width of BE3 for the two C-rich genomic sites tested was 5.0 (site A) and 6.1 (site B) nucleotides.

[0557] R126 in APOBEC1 is predicted to interact with the phosphate backbone of ssDNA¹³. Previous studies have shown that introducing the corresponding mutation into APOBEC3G decreased catalysis by at least 5-fold¹⁴. Interestingly, when introduced into APOBEC1 in BE3, R126A and R126E increased or maintained activity relative to BE3 at the most strongly edited positions (C5, C6, and C7), while decreasing editing activity at other positions (FIGS. 93A and 97C). Each of these two mutations therefore narrowed the width of the editing window at site A and site B to 4.4 and 3.4 nucleotides (R126A), or to 4.2 and 3.1 nucleotides (R126E), respectively (FIGS. 93A and 97C).

[0558] W90 in APOBEC1 (corresponding to W285 in APOBEC3G) is predicted to form a hydrophobic pocket in the APOBEC3G active site and assist in substrate binding¹³. Mutating this residue to Ala abrogated APOBEC3G's catalytic activity¹³. In BE3, W90A almost completely abrogated base editing efficiency (FIG. 97C). In contrast, it was found that W90Y only modestly decreased base editing activity while narrowing the editing window width at site A and site B to 3.8 and 4.9 nucleotides, respectively (FIG. 93A). These results demonstrate that mutations to the cytidine deaminase domain can narrow the activity window width of the corresponding base editors.

[0559] W90Y, R126E, and R132E, the three mutations that narrowed the editing window without drastically reducing base editing activity, were combined into doubly and triply mutated base editors. The double mutant W90Y+R126E resulted in a base editor (YE1-BE3) with BE3-like maximal editing efficiencies, but substantially narrowed editing window width (width at site A and site B=2.9 and 3.0 nucleotides, respectively (FIG. 93A). The W90Y+R132E base editor (YE2-BE3) exhibited modestly lower editing efficiencies (averaging 1.4-fold lower maximal editing yields across the five sites tested compared with BE3), and also substantially narrowed editing window width (width at site A and site B=2.7 and 2.8 nucleotides, respectively) (FIG. 97C). The R126E+R132E double mutant (EE-BE3) showed similar maximal editing efficiencies and editing window width as YE2-BE3 (FIG. 97C). The triple mutant W90Y+R126E+R132E (YEE-BE3) exhibited 2.0-fold lower average maximal editing yields but very little editing beyond the C6 position and an editing window width of 2.1 and 1.4 nucleotides for site A and site B, respectively (FIG. 97C). These data taken together indicate that mutations in the cytidine deaminase domain can strongly affect editing window widths, in some cases with minimal or only modest effects on editing efficiency.

[0560] The base editing outcomes of BE3, YE1-BE3, YE2-BE3, EE-BE3, and YEE-BE3 were further compared in HEK293T cells targeting four well-studied human genomic sites that contain multiple Cs within the BE3 activity window¹. These target loci contained target Cs at positions 4 and 5 (HEK site 3), positions 4 and 6 (HEK site 2), positions 5 and 6 (EMX1), or positions 6, 7, 8, and 11 (FANCF). BE3 exhibited little (<1.2-fold) preference for editing any Cs within the position 4-8 activity window. In contrast, YE1-BE3, exhibited a 1.3-fold preference for editing C5 over C4 (HEK site 3), 2.6-fold preference for C6 over C4 (HEK site 2), 2.0-fold preference for C5 over C6 (EMX1), and 1.5-fold preference for C6 over C7 (FANCF) (FIG. 93B). YE2-BE3 and EE-BE3 exhibited somewhat greater positional specificity (narrower activity window) than YE1-BE3, averaging 2.4-fold preference for editing C5 over C4 (HEK site 3), 9.5-fold preference for C6 over C4 (HEK site 2), 2.9-fold preference for C5 over C6 (EMX1), and 2.6-fold preference for C7 over C6 (FANCF) (FIG. 93B). YEE-BE3 showed the greatest positional selectivity, with a 2.9-fold preference for editing C5 over C4 (HEK site 3), 29.7-fold preference for C6 over C4 (HEK site 2), 7.9-fold preference for C5 over C6 (EMX1), and 7.9-fold preference for C7 over C6 (FANCF) (FIG. 93B). The findings establish that mutant base editors can discriminate between adjacent Cs, even when both nucleotides are within the BE3 editing window.

[0561] The product distributions of these four mutants and BE3 were further analyzed by HTS to evaluate their apparent processivity. BE3 generated predominantly T4-T5 (HEK site 3), T4-T6 (HEK site 2), and T5-T6 (EMX1) products in treated HEK293T cells, resulting in, on average, 7.4-fold more products containing two Ts, than products containing a single T. In contrast, YE1-BE3, YE2-BE3, EE-BE3, and YEE-BE3 showed substantially higher preferences for singly edited C4-T5, C4-T6, and T5-C6 products (FIG. 93C). YE1-BE3 yielded products with an average single-T to double-T product ratio of 1.4. YE2-BE3 and EE-BE3 yielded products with an average single-T to double-T product ratio of 4.3 and 5.1, respectively (FIG. 93C). Consistent with the above results, the YEE-BE3 triple mutant favored single-T products by an average of 14.3-fold across the three genomic loci. (FIG. 93C). For the target site in which only one C is within the target window (HEK site 4, at position C5), all four mutants exhibited comparable editing efficiencies as BE3 (FIG. 98). These findings indicate that these BE3 mutants have decreased apparent processivity and can favor the conversion of only a single C at target sites containing multiple Cs within the BE3 editing window. These data also suggest a positional preference of C5>C6>C7≈C4 for these mutant base editors, although this preference could differ depending on the target sequence.

[0562] The window-modulating mutations in APOBEC1 were applied to VQR-BE3, allowing selective base editing of substrates at sites targeted by NGA PAM (FIG. 107A). However, when these mutations were applied to SaKKH-BE3, a linear decrease in base editing efficiency was observed without the improvement in substrate selectivity, suggesting a different kinetic equilibrium and substrate accessibility of this base editor than those of BE3 and its variants (FIG. 107B).

[0563] The five base editors with altered PAM specificities described in this study together increase the number of disease-associated mutations in the ClinVar database that can in principle be corrected by base editing by 2.5-fold (FIGS. 94A and 94B). Similarly, the development of base editors with narrowed editing windows approximately doubles the fraction of ClinVar entries with a properly positioned NGG PAM that can be corrected by base editing without comparable modification of a non-target C (from 31% for BE3 to 59% for YEE-BE3) (FIGS. 94A and 94B).

[0564] In summary, the targeting scope of base editing was substantially expanded by developing base editors that use Cas9 variants with different PAM specificities, and by developing a collection of deaminase mutants with varying editing window widths. In theory, base editing should be possible using other programmable DNA-binding proteins (such as Cpf1¹⁶) that create a bubble of single-stranded DNA that can serve as a substrate for a single-strand-specific nucleotide deaminase enzyme.

### Materials and Methods

[0565] Cloning.

[0566] PCR was performed using Q5 Hot Start High-Fidelity DNA Polymerase (New England Biolabs). Plasmids for BE and sgRNA were constructed using USER cloning (New England Biolabs), obtained from previously reported plasmids¹. DNA vector amplification was carried out using NEB 10beta competent cells (New England Biolabs).

[0567] Cell Culture.

[0568] HEK293T (ATCC CRL-3216) were cultured in Dulbecco's Modified Eagle's Medium plus GlutaMax (ThermoFisher) supplemented with 10% (v/v) fetal bovine serum (FBS), at 37° C. with 5% CO₂. Immortalized rat astrocytes containing the ApoE4 isoform of the APOE gene (Taconic Biosciences) were maintained in Dulbecco's Modified Eagle's Medium plus GlutaMax (ThermoFisher Scientific) supplemented with 10% (v/v) fetal bovine serum (FBS) and 200 μg/mL Geneticin (ThermoFisher Scientific).

[0569] Transfections.

[0570] HEK293T cells were seeded on 48-well collagen-coated BioCoat plates (Corning) and transfected at approximately 85% confluency. 750 ng of BE and 250 ng of sgRNA expression plasmids were transfected using 1.5 μl of Lipofectamine 2000 (ThermoFisher Scientific) per well according to the manufacturer's protocol.

[0571] High-Throughput DNA Sequencing of Genomic DNA Samples.

[0572] Transfected cells were harvested after 3 d and the genomic DNA was isolated using the Agencourt DNAdvance Genomic DNA Isolation Kit (Beckman Coulter) according to the manufacturer's instructions. Genomic regions of interest were amplified by PCR with flanking HTS primer pairs listed in the Supplementary Sequences. PCR amplification was carried out with Phusion hot-start II DNA polymerase (ThermoFisher) according to the manufacturer's instructions. PCR products were purified using RapidTips (Diffinity Genomics). Secondary PCR was performed to attach sequencing adaptors. The products were gel-purified and quantified using the KAPA Library Quantification Kit-Illumina (KAPA Biosystems). Samples were sequenced on an Illumina MiSeq as previously described¹.

[0573] Data Analysis.

[0574] Nucleotide frequencies were assessed using a previously described MATLAB script¹. Briefly, the reads were aligned to the reference sequence via the Smith-Waterman algorithm. Base calls with Q-scores below 30 were replaced with a placeholder nucleotide (N). This quality threshold results in nucleotide frequencies with an expected theoretical error rate of 1 in 1000.

[0575] Analyses of base editing processivity were performed using a custom python script. This program trims sequencing reads to the 20 nucleotide protospacer sequence as determined by a perfect match for the 7 nucleotide sequences that should flank the target site. These targets were then consolidated and sorted by abundance to assess the frequency of base editing products.

[0576] Bioinformatic analysis of the ClinVar database of human disease-associated mutations was performed in a manner similar to that previously described but with small adjustments¹. These adjustments enable the identification of targets with PAMs of customizable length and sequence. In addition, this improved script includes a priority ranking of target C positions (C5>C6>C7>C8≈C4), thus enabling the identification of target sites in which the on-target C is either the only cytosine within the window or is placed at a position with higher predicted editing efficiency than any off-target C within the editing window.

### REFERENCES FOR EXAMPLE 12

[0577] 1 Komor, A. C. et al. Programmable editing of a target base in genomic DNA without double-stranded DNA cleavage. Nature 533, 420-424 (2016).
[0578] 2 Sander, J. D. & Joung, J. K. CRISPR-Cas systems for editing, regulating and targeting genomes. Nature biotechnology 32, 347-355 (2014).
[0579] 3 Cong, L. et al. Multiplex genome engineering using CRISPR/Cas systems. Science 339, 819-823 (2013).
[0580] 4 Ran, F. A. et al. Genome engineering using the CRISPR-Cas9 system. Nat. Protocols 8, 2281-2308 (2013).
[0581] 5 Landrum, M. J. et al. ClinVar: public archive of interpretations of clinically relevant variants. Nucleic Acids Res. 44, D862-D868 (2015).
[0582] 6 Nishida, K. et al. Targeted nucleotide editing using hybrid prokaryotic and vertebrate adaptive immune systems. Science 353, aaf8729-1-8 (2016).
[0583] 7 Ma, Y. et al. Targeted AID-mediated mutagenesis (TAM) enables efficient genomic diversification in mammalian cells. Nat. Methods doi:10.1038/nmeth.4027 (2016).
[0584] 8 Jiang, F. et al. Structures of a CRISPR-Cas9 R-loop complex primed for DNA cleavage. Science 351, 867-71 (2016).
[0585] 9 Ran, F. A. et al. In vivo genome editing using Staphylococcus aureus Cas9. Nature 520, 186-191 (2015).
[0586] 10 Zhang, Y. et al. Comparison of non-canonical PAMs for CRISPR/Cas9-mediated DNA cleavage in human cells. Sci. Rep. 4, (2014).
[0587] 11 Kleinstiver, B. P. et. al. Engineered CRISPR-Cas9 nucleases with altered PAM specificities. Nature 523, 481-485 (2015).
[0588] 12 Kleinstiver, B. P. et. al. Broadening the targeting range of Staphylococcus aureus CRISPR-Cas9 by modifying PAM recognition. Nat. Biotechnol. 33, 1293-1298 (2015).
[0589] 13 Holden, L. G. et al. Crystal structure of the anti-viral APOBEC3G catalytic domain and functional implications. Nature 452, 121-124 (2008).
[0590] 14 Chen, K.-M. et al. Structure of the DNA deaminase domain of the HIV-1 restriction factor APOBEC3G. Nature 452, 116-119 (2008).
[0591] 15 Harris, R. S., Petersen-Mahrt, S. K. & Neuberger, M. S. RNA Editing Enzyme APOBEC1 and Some of Its Homologs Can Act as DNA Mutators. Molecular Cell 10, 1247-1253 (2002).
[0592] 16 Zetsche, B. et al. Cpf1 Is a Single RNA-Guided Endonuclease of a Class 2 CRISPR-Cas System. Cell 163, 759-771 (2015).

### Example 13

[0593] Using improved transfection procedures and better plasmids, biological replicates (n=3) were used to install the four HF mutations into the Cas9 portion of BE3. The mutations do not significantly effect on-targeting editing with plasmid delivery (FIG. 99). At the tested concentration, BE3 protein delivery works; however, the on-target editing is lower than for plasmid delivery (FIG. 100). Protein delivery of BE3 with the HF mutations installed reduces on-targeting ediing efficiency but still yields some edited cells (FIG. 101).

[0594] Both lipofection and installing HF mutations were shown to decrease off-target deamination events. For the four sites shown in FIG. 102, the off-target sitest (OT) with the highest GUIDE-Seq reads and deamination events were assayed (Komor et al., Nature, 2016). The specificity ratio was calculated by dividing the off-target editing by the on-target editing at the closest corresponding C. In cases where off-target editing was not detectable, the ratio was set to 100. Thus, a higher specificity ratio indicates a more specific construct. BE3 plasmid delivery showed much higher off-target/on-target editing than protein delivery of BE3, plasmid delivery of HF-BE3, or protein delivery of HF-BE3 (FIGS. 102 and 105).

[0595] Purified proteins HF-BE3 and BE3 were analyzed in vitro for their capabilities to convert C to T residues at different positions in the spacer with the most permissive motif. Both BE3 and HF-BE3 proteins were found to have the same “window” for base editing (FIGS. 103 and 104).

[0596] A list of the disease targets is given in Table 8. The base to be edited in Table 8 is indicated in bold and underlined.

TABLE 8
Base Editor Disease Targets

| | | | SEQ | | | | |
|---|---|---|---|---|---|---|---|
| GENE | DISEASE | SPACER | ID NO | PAM | EDITOR | DEFECT | CELL |
| RB1 | RETINOBLASTOMA | AATCTAGTAAATAA | 571 | AAAA | SAKKH- | SPLICING | J82 |
| | | ATTGATGT | | GT | BE3 | IMPAIRMENT | |
| PTEN | CANCER | GACCAACGGCTAAG | 572 | TGA | VQR- | W111R | MC116 |
| | | TGAAGA | | | BE3 | | |
| PIK3CA | CANCER | TCCTTTCTTCACGGT | 573 | ACTG | SAKKH- | K111R | CRL- |
| | | TGCCT | | GT | BE3 | | 5853 |
| PIK3CA | CANCER | CTCCTGCTCAGTGAT | 574 | AGA | VQR- | Q546R | CRL- |
| | | TTCAG | | | BE3 | | 2505 |
| TP53 | CANCER | TGTCACACATGTAGT | 575 | TGG | YEE- | N239D | SNU475 |
| | | TGTAG | | | BE3 | | |
| HRAS | CANCER | CCTCCCGGCCGGCGG | 576 | AGG | YEE- | Q61R | MC/CAR |
| | | TATCC | | | BE3 | | |

TABLE 6
Exemplary diseases that may be treated using base editors. The protospacer and PAM
sequences (SEQ ID NOS: 577-589) are shown in the sgRNA (PAM) column. The PAM
sequence is shown in parentheses and with the base to be edited indicated by underlining.

| | gene | Base | | |
|---|---|---|---|---|
| Disease target | symbol | changed | sgRNA (PAM) | Base editor |
| Prion disease | PRNP | R37* | GGCAGCCGATACCCGGGGCA(GGG) | BE3 |
| | | | GGGCAGCCGATACCCGGGGC(AGG) | |
| Pendred syndrome | Slc26a4 | c.919-2A > G | TTATTGTCCGAAATAAAAGA(AGA) | BE3 |
| | | | ATTGTCCGAAATAAAAGAAG(AGG) | (VQR |
| | | | TTGTCCGAAATAAAAGAAGA(GGA) | SaCas9) |
| | | | GTCCGAAATAAAAGAAGAGGAAAA(AAT) | |
| | | | GTCCGAAATAAAAGAAGAGGAAAAA(ATT) | |
| Congenital deafness | Tmc1 | c.545A > G | CAGGAAGCACGAGGCCACTG(AGG) | BE3 |
| | | | AACAGGAAGCACGAGGCCAC(TGA) | YE-BE3 |
| | | | AGGAAGCACGAGGCCACTGA(GGA) | YEE-BE3 |
| Acquired deafness | SNHL | S33F | TTGGATTCTGGAATCCATTC(TGG) | BE3 |
| Alzheimer's Disease | APP | A673T | TCTGCATCCATCTTCACTTC(AGA) | BE3 VQR |
| Niemann-Pick Disease Type C | NPC1 | I1061T | CTTACAGCCAGTAATGTCAC(CGA) | BE3 VQR |

### Example 14: Testing Base Editing Constructs

[0597] Several base editing constructs, including BE3, BE4-pmCDA1, BE4-hAID, BE4-3G, BE4-N, BE4-SSB, BE4-(GGS)₃, BE4-XTEN, BE4-32aa, BE4-2×UGI, and BE4 were tested for their ability to edit a cytosine (C) residue within different target sequences (i.e., EMX1, FANCF, HEK2, HEK3, HEK4, and RNF2). For example, it was tested whether these constructs were capable of producing a C to T mutation. Schematic representations of the base editing constructs are shown in FIG. 109. The target sequences tested are also shown in FIG. 109 with the targeted cytosine numbered and indicated in red.

[0598] The following amino acid sequences were used in the base editing constructs of this example:

### UGI:

(SEQ ID NO: 736)
TNLSDIIEKETGKQLVIQESILMLPEEVEEVIGNKPESDILVHTAYDEST
DENVMLLTSDAPEYKPWALVIQDSNGENKIKML

rAPOBEC1:

(SEQ ID NO: 737)
SSETGPVAVDPTLRRRIEPHEFEVFFDPRELRKETCLLYEINWGGRHSIW
RHTSQNTNKHVEVNFIEKFTTERYFCPNTRCSITWFLSWSPCGECSRAIT
EFLSRYPHVTLFIYIARLYHHADPRNRQGLRDLISSGVTIQIMTEQESGY
CWRNFVNYSPSNEAHWPRYPHLWVRLYVLELYCIILGLPPCLNILRRKQP
QLTFFTIALQSCHYQRLPPHILWATGLK

pmCDA1:

(SEQ ID NO: 81)
MTDAEYVRIHEKLDIYTFKKQFFNNKKSVSHRCYVLFELKRRGERRACFW
GYAVNKPQSGTERGIHAEIFSIRKVEEYLRDNPGQFTINWYSSWSPCADC
AEKILEWYNQELRGNGHTLKIWACKLYYEKNARNQIGLWNLRDNGVGLNV
MVSEHYQCCRKIFIQSSHNQLNENRWLEKTLKRAEKRRSELSIMIQVKIL
HTTKSPAV

hAID:

SEQ ID NO: 49)
[sequence omitted]

hAPOBEC3G:

(SEQ ID NO: 60)

MELKYHPEMRFFHWFSKWRKLHRDQEYEVTWYISWSPCTKCTRDMATFLA
EDPKVTLTIFVARLYYFWDPDYQEALRSLCQKRDGPRATMKIMNYDEFQH
CWSKFVYSQRELFEPWNNLPKYYILLHIMLGEILRHSMDPPTFTFNFNNE
PWVRGRHETYLCYEVERMHNDTWVLLNQRRGFLCNQAPHKHGFLEGRHAE
LCFLDVIPFWKLDLDQDYRVTCFTSWSPCFSCAQEMAKFISKNKHVSLCI
FTARIYDDQGRCQEGLRTLAEAGAKISIMTYSEFKHCWDTFVDHQGCPFQ
PWDGLDEHSQDLSGRLRAILQNQEN

### SSB (Single-Stranded DNA Binding Protein):

(SEQ ID NO: 590)

ASRGVNKVILVGNLGQDPEVRYMPNGGAVANITLATSESWRDKATGEMKE
QTEWHRVVLFGKLAEVASEYLRKGSQVYIEGQLRTRKWTDQSGQDRYTTE
VVVNVGGTMQMLGGRQGGGAPAGGNIGGGQPQGGWGQPQQPQGGNQFSGG
AQSRPQQSAPAAPSNEPPMDFDDDIPF

### Linker Sequences:

### XTEN:

(SEQ ID NO: 604)

SGSETPGTSESATPES

32aa:

(SEQ ID NO: 605)

SGGSSGGSSGSETPGTSESATPESSGGSSGGS

### SGGS:

(SEQ ID NO: 606)

SGGS

### (GGS)₃:

(SEQ ID NO: 610)

GGSGGSGGS

[0604] The amino acid sequences of the constructs shown in FIG. 109 are set forth below:

[0605] BE3:

(SEQ ID NO: 174)

MSSETGPVAVDPTLRRRIEPHEFEVFFDPRELRKETCLLYEINWGGRHSI
WRHTSQNTNKHVEVNFIEKFTTERYFCPNTRCSITWFLSWSPCGECSRAI
TEFLSRYPHVTLFIYIARLYHHADPRNRQGLRDLISSGVTIQIMTEQESG
YCWRNFVNYSPSNEAHWPRYPHLWVRLYVLELYCIILGLPPCLNILRRKQ
PQLTFFTIALQSCHYQRLPPHILWATGLKSGSETPGTSESATPESDKKYS
IGLAIGTNSVGWAVITDEYKVPSKKFKVLGNTDRHSIKKNLIGALLFDSG
ETAEATRLKRTARRRYTRRKNRICYLQEIFSNEMAKVDDSFFHRLEESFL
VEEDKKHERHPIFGNIVDEVAYHEKYPTIYHLRKKLVDSTDKADLRLIYL
ALAHMIKFRGHFLIEGDLNPDNSDVDKLFIQLVQTYNQLFEENPINASGV
DAKAILSARLSKSRRLENLIAQLPGEKKNGLFGNLIALSLGLTPNFKSNF
DLAEDAKLQLSKDTYDDDLDNLLAQIGDQYADLFLAAKNLSDAILLSDIL
RVNTEITKAPLSASMIKRYDEHHQDLTLLKALVRQQLPEKYKEIFFDQSK
NGYAGYIDGGASQEEFYKFIKPILEKMDGTEELLVKLNREDLLRKQRTFD
NGSIPHQIHLGELHAILRRQEDFYPFLKDNREKIEKILTFRIPYYVGPLA
RGNSRFAWMTRKSEETITPWNFEEVVDKGASAQSFIERMTNFDKNLPNEK
VLPKHSLLYEYFTVYNELTKVKYVTEGMRKPAFLSGEQKKAIVDLLFKTN
RKVTVKQLKEDYFKKIECFDSVEISGVEDRFNASLGTYHDLLKIIKDKDF
LDNEENEDILEDIVLTLTLFEDREMIEERLKTYAHLFDDKVMKQLKRRRY
TGWGRLSRKLINGIRDKQSGKTILDFLKSDGFANRNFMQLIHDDSLTFKE
DIQKAQVSGQGDSLHEHIANLAGSPAIKKGILQTVKVVDELVKVMGRHKP
ENIVIEMARENQTTQKGQKNSRERMKRIEEGIKELGSQILKEHPVENTQL
QNEKLYLYYLQNGRDMYVDQELDINRLSDYDVDHIVPQSFLKDDSIDNKV
LTRSDKNRGKSDNVPSEEVVKKMKNYWRQLLNAKLITQRKFDNLTKAERG
GLSELDKAGFIKRQLVETRQITKHVAQILDSRMNTKYDENDKLIREVKVI
TLKSKLVSDFRKDFQFYKVREINNYHHAHDAYLNAVVGTALIKKYPKLES
EFVYGDYKVYDVRKMIAKSEQEIGKATAKYFFYSNIMNFFKTEITLANGE
IRKRPLIETNGETGEIVWDKGRDFATVRKVLSMPQVNIVKKTEVQTGGFS
KESILPKRNSDKLIARKKDWDPKKYGGFDSPTVAYSVLVVAKVEKGKSKK
LKSVKELLGITIMERSSFEKNPIDFLEAKGYKEVKKDLIIKLPKYSLFEL
ENGRKRMLASAGELQKGNELALPSKYVNFLYLASHYEKLKGSPEDNEQKQ
LFVEQHKHYLDEIIEQISEFSKRVILADANLDKVLSAYNKHRDKPIREQA
ENIIHLFTLTNLGAPAAFKYFDTTIDRKRYTSTKEVLDATLIHQSITGLY
ETRIDLSQLGGDSGGSTNLSDIIEKETGKQLVIQESILMLPEEVEEVIGN
KPESDILVHTAYDESTDENVMLLTSDAPEYKPWALVIQDSNGENKIKMLS
GGSPKKKRKV

[0606] BE4-pmCDA1:

(SEQ ID NO: 175)

MTDAEYVRIHEKLDIYTFKKQFFNNKKSVSHRCYVLFELKRRGERRACFW
GYAVNKPQSGTERGIHAEIFSIRKVEEYLRDNPGQFTINWYSSWSPCADC
AEKILEWYNQELRGNGHTLKIWACKLYYEKNARNQIGLWNLRDNGVGLNV
MVSEHYQCCRKIFIQSSHNQLNENRWLEKTLKRAEKRRSELSIMIQVKIL
HTTKSPAVSGSETPGTSESATPESDKKYSIGLAIGTNSVGWAVITDEYKV
PSKKFKVLGNTDRHSIKKNLIGALLFDSGETAEATRLKRTARRRYTRRKN
RICYLQEIFSNEMAKVDDSFFHRLEESFLVEEDKKHERHPIFGNIVDEVA
YHEKYPTIYHLRKKLVDSTDKADLRLIYLALAHMIKFRGHFLIEGDLNPD
NSDVDKLFIQLVQTYNQLFEENPINASGVDAKAILSARLSKSRRLENLIA
QLPGEKKNGLFGNLIALSLGLTPNFKSNFDLAEDAKLQLSKDTYDDDLDN
LLAQIGDQYADLFLAAKNLSDAILLSDILRVNTEITKAPLSASMIKRYDE
HHQDLTLLKALVRQQLPEKYKEIFFDQSKNGYAGYIDGGASQEEFYKFIK
PILEKMDGTEELLVKLNREDLLRKQRTFDNGSIPHQIHLGELHAILRRQE
DFYPFLKDNREKIEKILTFRIPYYVGPLARGNSRFAWMTRKSEETITPWN
FEEVVDKGASAQSFIERMTNFDKNLPNEKVLPKHSLLYEYFTVYNELTKV
KYVTEGMRKPAFLSGEQKKAIVDLLFKTNRKVTVKQLKEDYFKKIECFDS
VEISGVEDRFNASLGTYHDLLKIIKDKDFLDNEENEDILEDIVLTLTLFE
DREMIEERLKTYAHLFDDKVMKQLKRRRYTGWGRLSRKLINGIRDKQSGK
TILDFLKSDGFANRNFMQLIHDDSLTFKEDIQKAQVSGQGDSLHEHIANL
AGSPAIKKGILQTVKVVDELVKVMGRHKPENIVIEMARENQTTQKGQKNS
RERMKRIEEGIKELGSQILKEHPVENTQLQNEKLYLYYLQNGRDMYVDQE
LDINRLSDYDVDHIVPQSFLKDDSIDNKVLTRSDKNRGKSDNVPSEEVVK
KMKNYWRQLLNAKLITQRKFDNLTKAERGGLSELDKAGFIKRQLVETRQI
TKHVAQILDSRMNTKYDENDKLIREVKVITLKSKLVSDFRKDFQFYKVRE
INNYHHAHDAYLNAVVGTALIKKYPKLESEFVYGDYKVYDVRKMIAKSEQ
EIGKATAKYFFYSNIMNFFKTEITLANGEIRKRPLIETNGETGEIVWDKG
RDFATVRKVLSMPQVNIVKKTEVQTGGFSKESILPKRNSDKLIARKKDWD
PKKYGGFDSPTVAYSVLVVAKVEKGKSKKLKSVKELLGITIMERSSFEKN
PIDFLEAKGYKEVKKDLIIKLPKYSLFELENGRKRMLASAGELQKGNELA
LPSKYVNFLYLASHYEKLKGSPEDNEQKQLFVEQHKHYLDEIIEQISEFS
KRVILADANLDKVLSAYNKHRDKPIREQAENIIHLFTLTNLGAPAAFKYF
DTTIDRKRYTSTKEVLDATLIHQSITGLYETRIDLSQLGGDSGGSTNLSD
IIEKETGKQLVIQESILMLPEEVEEVIGNKPESDILVHTAYDESTDENVM
LLTSDAPEYKPWALVIQDSNGENKIKMLSGGSPKKKRKV

[0607] BE4-hAID:

(SEQ ID NO: 176)

MDSLLMNRRKFLYQFKNVRWAKGRRETYLCYVVKRRDSATSFSLDFGYLR
NKNGCHVELLFLRYISDWDLDPGRCYRVTWFTSWSPCYDCARHVADFLRG
NPNLSLRIFTARLYFCEDRKAEPEGLRRLHRAGVQIAIMTFKDYFYCWNT
FVENHERTFKAWEGLHENSVRLSRQLRRILLPLYEVDDLRDAFRTLGLSG
SETPGTSESATPESDKKYSIGLAIGTNSVGWAVITDEYKVPSKKFKVLGN
TDRHSIKKNLIGALLFDSGETAEATRLKRTARRRYTRRKNRICYLQEIFS
NEMAKVDDSFFHRLEESFLVEEDKKHERHPIFGNIVDEVAYHEKYPTIYH
LRKKLVDSTDKADLRLIYLALAHMIKFRGHFLIEGDLNPDNSDVDKLFIQ
LVQTYNQLFEENPINASGVDAKAILSARLSKSRRLENLIAQLPGEKKNGL
FGNLIALSLGLTPNFKSNFDLAEDAKLQLSKDTYDDDLDNLLAQIGDQYA
DLFLAAKNLSDAILLSDILRVNTEITKAPLSASMIKRYDEHHQDLTLLKA
LVRQQLPEKYKEIFFDQSKNGYAGYIDGGASQEEFYKFIKPILEKMDGTE
ELLVKLNREDLLRKQRTFDNGSIPHQIHLGELHAILRRQEDFYPFLKDNR
EKIEKILTFRIPYYVGPLARGNSRFAWMTRKSEETITPWNFEEVVDKGAS
AQSFIERMTNFDKNLPNEKVLPKHSLLYEYFTVYNELTKVKYVTEGMRKP
AFLSGEQKKAIVDLLFKTNRKVTVKQLKEDYFKKIECFDSVEISGVEDRF
NASLGTYHDLLKIIKDKDFLDNEENEDILEDIVLTLTLFEDREMIEERLK
TYAHLFDDKVMKQLKRRRYTGWGRLSRKLINGIRDKQSGKTILDFLKSDG
FANRNFMQLIHDDSLTFKEDIQKAQVSGQGDSLHEHIANLAGSPAIKKGI
LQTVKVVDELVKVMGRHKPENIVIEMARENQTTQKGQKNSRERMKRIEEG
IKELGSQILKEHPVENTQLQNEKLYLYYLQNGRDMYVDQELDINRLSDYD
VDHIVPQSFLKDDSIDNKVLTRSDKNRGKSDNVPSEEVVKKMKNYWRQLL
NAKLITQRKFDNLTKAERGGLSELDKAGFIKRQLVETRQITKHVAQILDS
RMNTKYDENDKLIREVKVITLKSKLVSDFRKDFQFYKVREINNYHHAHDA
YLNAVVGTALIKKYPKLESEFVYGDYKVYDVRKMIAKSEQEIGKATAKYF
FYSNIMNFFKTEITLANGEIRKRPLIETNGETGEIVWDKGRDFATVRKVL
SMPQVNIVKKTEVQTGGFSKESILPKRNSDKLIARKKDWDPKKYGGFDSP
TVAYSVLVVAKVEKGKSKKLKSVKELLGITIMERSSFEKNPIDFLEAKGY
KEVKKDLIIKLPKYSLFELENGRKRMLASAGELQKGNELALPSKYVNFLY
LASHYEKLKGSPEDNEQKQLFVEQHKHYLDEIIEQISEFSKRVILADANL
DKVLSAYNKHRDKPIREQAENIIHLFTLTNLGAPAAFKYFDTTIDRKRYT
STKEVLDATLIHQSITGLYETRIDLSQLGGDSGGSTNLSDIIEKETGKQL
VIQESILMLPEEVEEVIGNKPESDILVHTAYDESTDENVMLLTSDAPEYK
PWALVIQDSNGENKIKMLSGGSPKKKRKV

[0608] BE4-3G:

(SEQ ID NO: 177)

MELKYHPEMRFFHWFSKWRKLHRDQEYEVTWYISWSPCTKCTRDMATFLA
EDPKVTLTIFVARLYYFWDPDYQEALRSLCQKRDGPRATMKIMNYDEFQH
CWSKFVYSQRELFEPWNNLPKYYILLHIMLGEILRHSMDPPTFTFNFNNE
PWVRGRHETYLCYEVERMHNDTWVLLNQRRGFLCNQAPHKHGFLEGRHAE
LCFLDVIPFWKLDLDQDYRVTCFTSWSPCFSCAQEMAKFISKNKHVSLCI
FTARIYDDQGRCQEGLRTLAEAGAKISIMTYSEFKHCWDTFVDHQGCPFQ
PWDGLDEHSQDLSGRLRAILQNQENSGSETPGTSESATPESDKKYSIGLA
IGTNSVGWAVITDEYKVPSKKFKVLGNTDRHSIKKNLIGALLFDSGETAE
ATRLKRTARRRYTRRKNRICYLQEIFSNEMAKVDDSFFHRLEESFLVEED
KKHERHPIFGNIVDEVAYHEKYPTIYHLRKKLVDSTDKADLRLIYLALAH
MIKFRGHFLIEGDLNPDNSDVDKLFIQLVQTYNQLFEENPINASGVDAKA
ILSARLSKSRRLENLIAQLPGEKKNGLFGNLIALSLGLTPNFKSNFDLAE
DAKLQLSKDTYDDDLDNLLAQIGDQYADLFLAAKNLSDAILLSDILRVNT
EITKAPLSASMIKRYDEHHQDLTLLKALVRQQLPEKYKEIFFDQSKNGYA
GYIDGGASQEEFYKFIKPILEKMDGTEELLVKLNREDLLRKQRTFDNGSI
PHQIHLGELHAILRRQEDFYPFLKDNREKIEKILTFRIPYYVGPLARGNS
RFAWMTRKSEETITPWNFEEVVDKGASAQSFIERMTNFDKNLPNEKVLPK
HSLLYEYFTVYNELTKVKYVTEGMRKPAFLSGEQKKAIVDLLFKTNRKVT
VKQLKEDYFKKIECFDSVEISGVEDRFNASLGTYHDLLKIIKDKDFLDNE
ENEDILEDIVLTLTLFEDREMIEERLKTYAHLFDDKVMKQLKRRRYTGWG
RLSRKLINGIRDKQSGKTILDFLKSDGFANRNFMQLIHDDSLTFKEDIQK
AQVSGQGDSLHEHIANLAGSPAIKKGILQTVKVVDELVKVMGRHKPENIV
IEMARENQTTQKGQKNSRERMKRIEEGIKELGSQILKEHPVENTQLQNEK
LYLYYLQNGRDMYVDQELDINRLSDYDVDHIVPQSFLKDDSIDNKVLTRS
DKNRGKSDNVPSEEVVKKMKNYWRQLLNAKLITQRKFDNLTKAERGGLSE
LDKAGFIKRQLVETRQITKHVAQILDSRMNTKYDENDKLIREVKVITLKS
KLVSDFRKDFQFYKVREINNYHHAHDAYLNAVVGTALIKKYPKLESEFVY
GDYKVYDVRKMIAKSEQEIGKATAKYFFYSNIMNFFKTEITLANGEIRKR
PLIETNGETGEIVWDKGRDFATVRKVLSMPQVNIVKKTEVQTGGFSKESI
LPKRNSDKLIARKKDWDPKKYGGFDSPTVAYSVLVVAKVEKGKSKKLKSV
KELLGITIMERSSFEKNPIDFLEAKGYKEVKKDLIIKLPKYSLFELENGR
KRMLASAGELQKGNELALPSKYVNFLYLASHYEKLKGSPEDNEQKQLFVE
QHKHYLDEIIEQISEFSKRVILADANLDKVLSAYNKHRDKPIREQAENII
HLFTLTNLGAPAAFKYFDTTIDRKRYTSTKEVLDATLIHQSITGLYETRI
DLSQLGGDSGGSTNLSDIIEKETGKQLVIQESILMLPEEVEEVIGNKPES
DILVHTAYDESTDENVMLLTSDAPEYKPWALVIQDSNGENKIKMLSGGSP
KKKRKV

[0609] BE4-N:

(SEQ ID NO: 178)

MTNLSDIIEKETGKQLVIQESILMLPEEVEEVIGNKPESDILVHTAYDES
TDENVMLLTSDAPEYKPWALVIQDSNGENKIKMLGGSSSETGPVAVDPTL
RRRIEPHEFEVFFDPRELRKETCLLYEINWGGRHSIWRHTSQNTNKHVEV
NFIEKFTTERYFCPNTRCSITWFLSWSPCGECSRAITEFLSRYPHVTLFI
YIARLYHHADPRNRQGLRDLISSGVTIQIMTEQESGYCWRNFVNYSPSNE
AHWPRYPHLWVRLYVLELYCIILGLPPCLNILRRKQPQLTFFTIALQSCH
YQRLPPHILWATGLKSGSETPGTSESATPESDKKYSIGLAIGTNSVGWAV
ITDEYKVPSKKFKVLGNTDRHSIKKNLIGALLFDSGETAEATRLKRTARR
RYTRRKNRICYLQEIFSNEMAKVDDSFFHRLEESFLVEEDKKHERHPIFG
NIVDEVAYHEKYPTIYHLRKKLVDSTDKADLRLIYLALAHMIKFRGHFLI
EGDLNPDNSDVDKLFIQLVQTYNQLFEENPINASGVDAKAILSARLSKSR
RLENLIAQLPGEKKNGLFGNLIALSLGLTPNFKSNFDLAEDAKLQLSKDT
YDDDLDNLLAQIGDQYADLFLAAKNLSDAILLSDILRVNTEITKAPLSAS
MIKRYDEHHQDLTLLKALVRQQLPEKYKEIFFDQSKNGYAGYIDGGASQE
EFYKFIKPILEKMDGTEELLVKLNREDLLRKQRTFDNGSIPHQIHLGELH
AILRRQEDFYPFLKDNREKIEKILTFRIPYYVGPLARGNSRFAWMTRKSE
ETITPWNFEEVVDKGASAQSFIERMTNFDKNLPNEKVLPKHSLLYEYFTV
YNELTKVKYVTEGMRKPAFLSGEQKKAIVDLLFKTNRKVTVKQLKEDYFK
KIECFDSVEISGVEDRFNASLGTYHDLLKIIKDKDFLDNEENEDILEDIV
LTLTLFEDREMIEERLKTYAHLFDDKVMKQLKRRRYTGWGRLSRKLINGI
RDKQSGKTILDFLKSDGFANRNFMQLIHDDSLTFKEDIQKAQVSGQGDSL
HEHIANLAGSPAIKKGILQTVKVVDELVKVMGRHKPENIVIEMARENQTT
QKGQKNSRERMKRIEEGIKELGSQILKEHPVENTQLQNEKLYLYYLQNGR
DMYVDQELDINRLSDYDVDHIVPQSFLKDDSIDNKVLTRSDKNRGKSDNV
PSEEVVKKMKNYWRQLLNAKLITQRKFDNLTKAERGGLSELDKAGFIKRQ
LVETRQITKHVAQILDSRMNTKYDENDKLIREVKVITLKSKLVSDFRKDF
QFYKVREINNYHHAHDAYLNAVVGTALIKKYPKLESEFVYGDYKVYDVRK
MIAKSEQEIGKATAKYFFYSNIMNFFKTEITLANGEIRKRPLIETNGETG
EIVWDKGRDFATVRKVLSMPQVNIVKKTEVQTGGFSKESILPKRNSDKLI
ARKKDWDPKKYGGFDSPTVAYSVLVVAKVEKGKSKKLKSVKELLGITIME
RSSFEKNPIDFLEAKGYKEVKKDLIIKLPKYSLFELENGRKRMLASAGEL
QKGNELALPSKYVNFLYLASHYEKLKGSPEDNEQKQLFVEQHKHYLDEII
EQISEFSKRVILADANLDKVLSAYNKHRDKPIREQAENIIHLFTLTNLGA
PAAFKYFDTTIDRKRYTSTKEVLDATLIHQSITGLYETRIDLSQLGGDSG
GSPKKKRKV

[0610] BE4-SSB:

(SEQ ID NO: 179)

MSSETGPVAVDPTLRRRIEPHEFEVFFDPRELRKETCLLYEINWGGRHSI
WRHTSQNTNKHVEVNFIEKFTTERYFCPNTRCSITWFLSWSPCGECSRAI
TEFLSRYPHVTLFIYIARLYHHADPRNRQGLRDLISSGVTIQIMTEQESG
YCWRNFVNYSPSNEAHWPRYPHLWVRLYVLELYCIILGLPPCLNILRRKQ
PQLTFFTIALQSCHYQRLPPHILWATGLKSGSETPGTSESATPESDKKYS
IGLAIGTNSVGWAVITDEYKVPSKKFKVLGNTDRHSIKKNLIGALLFDSG
ETAEATRLKRTARRRYTRRKNRICYLQEIFSNEMAKVDDSFFHRLEESFL
VEEDKKHERHPIFGNIVDEVAYHEKYPTIYHLRKKLVDSTDKADLRLIYL
ALAHMIKFRGHFLIEGDLNPDNSDVDKLFIQLVQTYNQLFEENPINASGV
DAKAILSARLSKSRRLENLIAQLPGEKKNGLFGNLIALSLGLTPNFKSNF
DLAEDAKLQLSKDTYDDDLDNLLAQIGDQYADLFLAAKNLSDAILLSDIL
RVNTEITKAPLSASMIKRYDEHHQDLTLLKALVRQQLPEKYKEIFFDQSK
NGYAGYIDGGASQEEFYKFIKPILEKMDGTEELLVKLNREDLLRKQRTFD
NGSIPHQIHLGELHAILRRQEDFYPFLKDNREKIEKILTFRIPYYVGPLA
RGNSRFAWMTRKSEETITPWNFEEVVDKGASAQSFIERMTNFDKNLPNEK
VLPKHSLLYEYFTVYNELTKVKYVTEGMRKPAFLSGEQKKAIVDLLFKTN
RKVTVKQLKEDYFKKIECFDSVEISGVEDRFNASLGTYHDLLKIIKDKDF
LDNEENEDILEDIVLTLTLFEDREMIEERLKTYAHLFDDKVMKQLKRRRY
TGWGRLSRKLINGIRDKQSGKTILDFLKSDGFANRNFMQLIHDDSLTFKE
DIQKAQVSGQGDSLHEHIANLAGSPAIKKGILQTVKVVDELVKVMGRHKP
ENIVIEMARENQTTQKGQKNSRERMKRIEEGIKELGSQILKEHPVENTQL
QNEKLYLYYLQNGRDMYVDQELDINRLSDYDVDHIVPQSFLKDDSIDNKV
LTRSDKNRGKSDNVPSEEVVKKMKNYWRQLLNAKLITQRKFDNLTKAERG
GLSELDKAGFIKRQLVETRQITKHVAQILDSRMNTKYDENDKLIREVKVI
TLKSKLVSDFRKDFQFYKVREINNYHHAHDAYLNAVVGTALIKKYPKLES
EFVYGDYKVYDVRKMIAKSEQEIGKATAKYFFYSNIMNFFKTEITLANGE
IRKRPLIETNGETGEIVWDKGRDFATVRKVLSMPQVNIVKKTEVQTGGFS
KESILPKRNSDKLIARKKDWDPKKYGGFDSPTVAYSVLVVAKVEKGKSKK
LKSVKELLGITIMERSSFEKNPIDFLEAKGYKEVKKDLIIKLPKYSLFEL
ENGRKRMLASAGELQKGNELALPSKYVNFLYLASHYEKLKGSPEDNEQKQ
LFVEQHKHYLDEIIEQISEFSKRVILADANLDKVLSAYNKHRDKPIREQA
ENIIHLFTLTNLGAPAAFKYFDTTIDRKRYTSTKEVLDATLIHQSITGLY
ETRIDLSQLGGDSGGSGGSGGSASRGVNKVILVGNLGQDPEVRYMPNGGA
VANITLATSESWRDKATGEMKEQTEWHRVVLFGKLAEVASEYLRKGSQVY
IEGQLRTRKWTDQSGQDRYTTEVVVNVGGTMQMLGGRQGGGAPAGGNIGG
GQPQGGWGQPQQPQGGNQFSGGAQSRPQQSAPAAPSNEPPMDFDDDIPFS
GGSPKKKRKV

[0611] BE4-(GGS)₃:

(SEQ ID NO: 180)

MSSETGPVAVDPTLRRRIEPHEFEVFFDPRELRKETCLLYEINWGGRHSI
WRHTSQNTNKHVEVNFIEKFTTERYFCPNTRCSITWFLSWSPCGECSRAI
TEFLSRYPHVTLFIYIARLYHHADPRNRQGLRDLISSGVTIQIMTEQESG
YCWRNFVNYSPSNEAHWPRYPHLWVRLYVLELYCIILGLPPCLNILRRKQ
PQLTFFTIALQSCHYQRLPPHILWATGLKSGSETPGTSESATPESDKKYS
IGLAIGTNSVGWAVITDEYKVPSKKFKVLGNTDRHSIKKNLIGALLFDSG
ETAEATRLKRTARRRYTRRKNRICYLQEIFSNEMAKVDDSFFHRLEESFL
VEEDKKHERHPIFGNIVDEVAYHEKYPTIYHLRKKLVDSTDKADLRLIYL
ALAHMIKFRGHFLIEGDLNPDNSDVDKLFIQLVQTYNQLFEENPINASGV
DAKAILSARLSKSRRLENLIAQLPGEKKNGLFGNLIALSLGLTPNFKSNF
DLAEDAKLQLSKDTYDDDLDNLLAQIGDQYADLFLAAKNLSDAILLSDIL
RVNTEITKAPLSASMIKRYDEHHQDLTLLKALVRQQLPEKYKEIFFDQSK
NGYAGYIDGGASQEEFYKFIKPILEKMDGTEELLVKLNREDLLRKQRTFD
NGSIPHQIHLGELHAILRRQEDFYPFLKDNREKIEKILTFRIPYYVGPLA
RGNSRFAWMTRKSEETITPWNFEEVVDKGASAQSFIERMTNFDKNLPNEK
VLPKHSLLYEYFTVYNELTKVKYVTEGMRKPAFLSGEQKKAIVDLLFKTN
RKVTVKQLKEDYFKKIECFDSVEISGVEDRFNASLGTYHDLLKIIKDKDF
LDNEENEDILEDIVLTLTLFEDREMIEERLKTYAHLFDDKVMKQLKRRRY
TGWGRLSRKLINGIRDKQSGKTILDFLKSDGFANRNFMQLIHDDSLTFKE
DIQKAQVSGQGDSLHEHIANLAGSPAIKKGILQTVKVVDELVKVMGRHKP
ENIVIEMARENQTTQKGQKNSRERMKRIEEGIKELGSQILKEHPVENTQL
QNEKLYLYYLQNGRDMYVDQELDINRLSDYDVDHIVPQSFLKDDSIDNKV
LTRSDKNRGKSDNVPSEEVVKKMKNYWRQLLNAKLITQRKFDNLTKAERG
GLSELDKAGFIKRQLVETRQITKHVAQILDSRMNTKYDENDKLIREVKVI
TLKSKLVSDFRKDFQFYKVREINNYHHAHDAYLNAVVGTALIKKYPKLES
EFVYGDYKVYDVRKMIAKSEQEIGKATAKYFFYSNIMNFFKTEITLANGE
IRKRPLIETNGETGEIVWDKGRDFATVRKVLSMPQVNIVKKTEVQTGGFS
KESILPKRNSDKLIARKKDWDPKKYGGFDSPTVAYSVLVVAKVEKGKSKK
LKSVKELLGITIMERSSFEKNPIDFLEAKGYKEVKKDLIIKLPKYSLFEL
ENGRKRMLASAGELQKGNELALPSKYVNFLYLASHYEKLKGSPEDNEQKQ
LFVEQHKHYLDEIIEQISEFSKRVILADANLDKVLSAYNKHRDKPIREQA
ENIIHLFTLTNLGAPAAFKYFDTTIDRKRYTSTKEVLDATLIHQSITGLY
ETRIDLSQLGGDSGGSGGSGGSTNLSDIIEKETGKQLVIQESILMLPEEV
EEVIGNKPESDILVHTAYDESTDENVMLLTSDAPEYKPWALVIQDSNGEN
KIKMLSGGSPKKKRKV

[0612] BE4-XTEN:

(SEQ ID NO: 181)

MSSETGPVAVDPTLRRRIEPHEFEVFFDPRELRKETCLLYEINWGGRHSI
WRHTSQNTNKHVEVNFIEKFTTERYFCPNTRCSITWFLSWSPCGECSRAI
TEFLSRYPHVTLFIYIARLYHHADPRNRQGLRDLISSGVTIQIMTEQESG
YCWRNFVNYSPSNEAHWPRYPHLWVRLYVLELYCIILGLPPCLNILRRKQ
PQLTFFTIALQSCHYQRLPPHILWATGLKSGSETPGTSESATPESDKKYS
IGLAIGTNSVGWAVITDEYKVPSKKFKVLGNTDRHSIKKNLIGALLFDSG
ETAEATRLKRTARRRYTRRKNRICYLQEIFSNEMAKVDDSFFHRLEESFL
VEEDKKHERHPIFGNIVDEVAYHEKYPTIYHLRKKLVDSTDKADLRLIYL
ALAHMIKFRGHFLIEGDLNPDNSDVDKLFIQLVQTYNQLFEENPINASGV
DAKAILSARLSKSRRLENLIAQLPGEKKNGLFGNLIALSLGLTPNFKSNF
DLAEDAKLQLSKDTYDDDLDNLLAQIGDQYADLFLAAKNLSDAILLSDIL
RVNTEITKAPLSASMIKRYDEHHQDLTLLKALVRQQLPEKYKEIFFDQSK
NGYAGYIDGGASQEEFYKFIKPILEKMDGTEELLVKLNREDLLRKQRTFD
NGSIPHQIHLGELHAILRRQEDFYPFLKDNREKIEKILTFRIPYYVGPLA
RGNSRFAWMTRKSEETITPWNFEEVVDKGASAQSFIERMTNFDKNLPNEK
VLPKHSLLYEYFTVYNELTKVKYVTEGMRKPAFLSGEQKKAIVDLLFKTN
RKVTVKQLKEDYFKKIECFDSVEISGVEDRFNASLGTYHDLLKIIKDKDF
LDNEENEDILEDIVLTLTLFEDREMIEERLKTYAHLFDDKVMKQLKRRRY
TGWGRLSRKLINGIRDKQSGKTILDFLKSDGFANRNFMQLIHDDSLTFKE
DIQKAQVSGQGDSLHEHIANLAGSPAIKKGILQTVKVVDELVKVMGRHKP
ENIVIEMARENQTTQKGQKNSRERMKRIEEGIKELGSQILKEHPVENTQL
QNEKLYLYYLQNGRDMYVDQELDINRLSDYDVDHIVPQSFLKDDSIDNKV
LTRSDKNRGKSDNVPSEEVVKKMKNYWRQLLNAKLITQRKFDNLTKAERG
GLSELDKAGFIKRQLVETRQITKHVAQILDSRMNTKYDENDKLIREVKVI
TLKSKLVSDFRKDFQFYKVREINNYHHAHDAYLNAVVGTALIKKYPKLES
EFVYGDYKVYDVRKMIAKSEQEIGKATAKYFFYSNIMNFFKTEITLANGE
IRKRPLIETNGETGEIVWDKGRDFATVRKVLSMPQVNIVKKTEVQTGGFS
KESILPKRNSDKLIARKKDWDPKKYGGFDSPTVAYSVLVVAKVEKGKSKK
LKSVKELLGITIMERSSFEKNPIDFLEAKGYKEVKKDLIIKLPKYSLFEL
ENGRKRMLASAGELQKGNELALPSKYVNFLYLASHYEKLKGSPEDNEQKQ
LFVEQHKHYLDEIIEQISEFSKRVILADANLDKVLSAYNKHRDKPIREQA
ENIIHLFTLTNLGAPAAFKYFDTTIDRKRYTSTKEVLDATLIHQSITGLY
ETRIDLSQLGGDSGSETPGTSESATPESTNLSDIIEKETGKQLVIQESIL
MLPEEVEEVIGNKPESDILVHTAYDESTDENVMLLTSDAPEYKPWALVIQ
DSNGENKIKMLSGGSPKKKRKV

[0613] BE4-32aa:

(SEQ ID NO: 182)

MSSETGPVAVDPTLRRRIEPHEFEVFFDPRELRKETCLLYEINWGGRHSI
WRHTSQNTNKHVEVNFIEKFTTERYFCPNTRCSITWFLSWSPCGECSRAI
TEFLSRYPHVTLFIYIARLYHHADPRNRQGLRDLISSGVTIQIMTEQESG
YCWRNFVNYSPSNEAHWPRYPHLWVRLYVLELYCIILGLPPCLNILRRKQ
PQLTFFTIALQSCHYQRLPPHILWATGLKSGGSSGGSSGSETPGTSESAT
PESSGGSSGGSDKKYSIGLAIGTNSVGWAVITDEYKVPSKKFKVLGNTDR
HSIKKNLIGALLFDSGETAEATRLKRTARRRYTRRKNRICYLQEIFSNEM
AKVDDSFFHRLEESFLVEEDKKHERHPIFGNIVDEVAYHEKYPTIYHLRK
KLVDSTDKADLRLIYLALAHMIKFRGHFLIEGDLNPDNSDVDKLFIQLVQ
TYNQLFEENPINASGVDAKAILSARLSKSRRLENLIAQLPGEKKNGLFGN
LIALSLGLTPNFKSNFDLAEDAKLQLSKDTYDDDLDNLLAQIGDQYADLF
LAAKNLSDAILLSDILRVNTEITKAPLSASMIKRYDEHHQDLTLLKALVR
QQLPEKYKEIFFDQSKNGYAGYIDGGASQEEFYKFIKPILEKMDGTEELL
VKLNREDLLRKQRTFDNGSIPHQIHLGELHAILRRQEDFYPFLKDNREKI
EKILTFRIPYYVGPLARGNSRFAWMTRKSEETITPWNFEEVVDKGASAQS
FIERMTNFDKNLPNEKVLPKHSLLYEYFTVYNELTKVKYVTEGMRKPAFL
SGEQKKAIVDLLFKTNRKVTVKQLKEDYFKKIECFDSVEISGVEDRFNAS
LGTYHDLLKIIKDKDFLDNEENEDILEDIVLTLTLFEDREMIEERLKTYA
HLFDDKVMKQLKRRRYTGWGRLSRKLINGIRDKQSGKTILDFLKSDGFAN
RNFMQLIHDDSLTFKEDIQKAQVSGQGDSLHEHIANLAGSPAIKKGILQT
VKVVDELVKVMGRHKPENIVIEMARENQTTQKGQKNSRERMKRIEEGIKE
LGSQILKEHPVENTQLQNEKLYLYYLQNGRDMYVDQELDINRLSDYDVDH
IVPQSFLKDDSIDNKVLTRSDKNRGKSDNVPSEEVVKKMKNYWRQLLNAK
LITQRKFDNLTKAERGGLSELDKAGFIKRQLVETRQITKHVAQILDSRMN
TKYDENDKLIREVKVITLKSKLVSDFRKDFQFYKVREINNYHHAHDAYLN
AVVGTALIKKYPKLESEFVYGDYKVYDVRKMIAKSEQEIGKATAKYFFYS
NIMNFFKTEITLANGEIRKRPLIETNGETGEIVWDKGRDFATVRKVLSMP
QVNIVKKTEVQTGGFSKESILPKRNSDKLIARKKDWDPKKYGGFDSPTVA
YSVLVVAKVEKGKSKKLKSVKELLGITIMERSSFEKNPIDFLEAKGYKEV
KKDLIIKLPKYSLFELENGRKRMLASAGELQKGNELALPSKYVNFLYLAS
HYEKLKGSPEDNEQKQLFVEQHKHYLDEIIEQISEFSKRVILADANLDKV
LSAYNKHRDKPIREQAENIIHLFTLTNLGAPAAFKYFDTTIDRKRYTSTK
EVLDATLIHQSITGLYETRIDLSQLGGDSGGSTNLSDIIEKETGKQLVIQ
ESILMLPEEVEEVIGNKPESDILVHTAYDESTDENVMLLTSDAPEYKPWA
LVIQDSNGENKIKMLSGGSPKKKRKV

[0614] BE4-2XUGI:

(SEQ ID NO: 183)

MSSETGPVAVDPTLRRRIEPHEFEVFFDPRELRKETCLLYEINWGGRHSI
WRHTSQNTNKHVEVNFIEKFTTERYFCPNTRCSITWFLSWSPCGECSRAI
TEFLSRYPHVTLFIYIARLYHHADPRNRQGLRDLISSGVTIQIMTEQESG
YCWRNFVNYSPSNEAHWPRYPHLWVRLYVLELYCIILGLPPCLNILRRKQ
PQLTFFTIALQSCHYQRLPPHILWATGLKSGSETPGTSESATPESDKKYS
IGLAIGTNSVGWAVITDEYKVPSKKFKVLGNTDRHSIKKNLIGALLFDSG
ETAEATRLKRTARRRYTRRKNRICYLQEIFSNEMAKVDDSFFHRLEESFL
VEEDKKHERHPIFGNIVDEVAYHEKYPTIYHLRKKLVDSTDKADLRLIYL
ALAHMIKFRGHFLIEGDLNPDNSDVDKLFIQLVQTYNQLFEENPINASGV
DAKAILSARLSKSRRLENLIAQLPGEKKNGLFGNLIALSLGLTPNFKSNF
DLAEDAKLQLSKDTYDDDLDNLLAQIGDQYADLFLAAKNLSDAILLSDIL
RVNTEITKAPLSASMIKRYDEHHQDLTLLKALVRQQLPEKYKEIFFDQSK
NGYAGYIDGGASQEEFYKFIKPILEKMDGTEELLVKLNREDLLRKQRTFD
NGSIPHQIHLGELHAILRRQEDFYPFLKDNREKIEKILTFRIPYYVGPLA
RGNSRFAWMTRKSEETITPWNFEEVVDKGASAQSFIERMTNFDKNLPNEK
VLPKHSLLYEYFTVYNELTKVKYVTEGMRKPAFLSGEQKKAIVDLLFKTN
RKVTVKQLKEDYFKKIECFDSVETSGVEDRFNASLGTYHDLLKIIKDKDF
LDNEENEDILEDIVLTLTLFEDREMIEERLKTYAHLFDDKVMKQLKRRRY
TGWGRLSRKLINGIRDKQSGKTILDFLKSDGFANRNFMQLIHDDSLTFKE
DIQKAQVSGQGDSLHEHIANLAGSPAIKKGILQTVKVVDELVKVMGRHKP
ENIVIEMARENQTTQKGQKNSRERMKRIEEGIKELGSQILKEHPVENTQL
QNEKLYLYYLQNGRDMYVDQELDINRLSDYDVDHIVPQSFLKDDSIDNKV
LTRSDKNRGKSDNVPSEEVVKKMKNYWRQLLNAKLITQRKFDNLTKAERG
GLSELDKAGFIKRQLVETRQITKHVAQILDSRMNTKYDENDKLIREVKVI
TLKSKLVSDFRKDFQFYKVREINNYHHAHDAYLNAVVGTALIKKYPKLES
EFVYGDYKVYDVRKMIAKSEQEIGKATAKYFFYSNIMNFFKTEITLANGE
IRKRPLIETNGETGEIVWDKGRDFATVRKVLSMPQVNIVKKTEVQTGGFS
KESILPKRNSDKLIARKKDWDPKKYGGFDSPTVAYSVLVVAKVEKGKSKK
LKSVKELLGITIMERSSFEKNPIDFLEAKGYKEVKKDLIIKLPKYSLFEL
ENGRKRMLASAGELQKGNELALPSKYVNFLYLASHYEKLKGSPEDNEQKQ
LFVEQHKHYLDEIIEQISEFSKRVILADANLDKVLSAYNKHRDKPIREQA
ENIIHLFTLTNLGAPAAFKYFDTTIDRKRYTSTKEVLDATLIHQSITGLY
ETRIDLSQLGGDSGGSTNLSDIIEKETGKQLVIQESILMLPEEVEEVIGN
KPESDILVHTAYDESTDENVMLLTSDAPEYKPWALVIQDSNGENKIKMLS
GGSTNLSDIIEKETGKQLVIQESILMLPEEVEEVIGNKPESDILVHTAYD
ESTDENVMLLTSDAPEYKPWALVIQDSNGENKIKMLSGGSPKKKRKV

[0615] BE4:

(SEQ ID NO: 184)

MSSETGPVAVDPTLRRRIEPHEFEVFFDPRELRKETCLLYEINWGGRHSI
WRHTSQNTNKHVEVNFIEKFTTERYFCPNTRCSITWFLSWSPCGECSRAI
TEFLSRYPHVTLFIYIARLYHHADPRNRQGLRDLISSGVTIQIMTEQESG
YCWRNFVNYSPSNEAHWPRYPHLWVRLYVLELYCIILGLPPCLNILRRKQ
PQLTFFTIALQSCHYQRLPPHILWATGLKSGGSSGGSSGSETPGTSESAT
PESSGGSSGGSDKKYSIGLAIGTNSVGWAVITDEYKVPSKKFKVLGNTDR
HSIKKNLIGALLFDSGETAEATRLKRTARRRYTRRKNRICYLQEIFSNEM
AKVDDSFFHRLEESFLVEEDKKHERHPIFGNIVDEVAYHEKYPTIYHLRK
KLVDSTDKADLRLIYLALAHMIKFRGHFLIEGDLNPDNSDVDKLFIQLVQ
TYNQLFEENPINASGVDAKAILSARLSKSRRLENLIAQLPGEKKNGLFGN
LIALSLGLTPNFKSNFDLAEDAKLQLSKDTYDDDLDNLLAQIGDQYADLF
LAAKNLSDAILLSDILRVNTEITKAPLSASMIKRYDEHHQDLTLLKALVR
QQLPEKYKEIFFDQSKNGYAGYIDGGASQEEFYKFIKPILEKMDGTEELL
VKLNREDLLRKQRTFDNGSIPHQIHLGELHAILRRQEDFYPFLKDNREKI
EKILTFRIPYYVGPLARGNSRFAWMTRKSEETITPWNFEEVVDKGASAQS
FIERMTNFDKNLPNEKVLPKHSLLYEYFTVYNELTKVKYVTEGMRKPAFL
SGEQKKAIVDLLFKTNRKVTVKQLKEDYFKKIECFDSVETSGVEDRFNAS
LGTYHDLLKIIKDKDFLDNEENEDILEDIVLTLTLFEDREMIEERLKTYA
HLFDDKVMKQLKRRRYTGWGRLSRKLINGIRDKQSGKTILDFLKSDGFAN
RNFMQLIHDDSLTFKEDIQKAQVSGQGDSLHEHIANLAGSPAIKKGILQT
VKVVDELVKVMGRHKPENIVIEMARENQTTQKGQKNSRERMKRIEEGIKE
LGSQILKEHPVENTQLQNEKLYLYYLQNGRDMYVDQELDINRLSDYDVDH
IVPQSFLKDDSIDNKVLTRSDKNRGKSDNVPSEEVVKKMKNYWRQLLNAK
LITQRKFDNLTKAERGGLSELDKAGFIKRQLVETRQITKHVAQILDSRMN
TKYDENDKLIREVKVITLKSKLVSDFRKDFQFYKVREINNYHHAHDAYLN
AVVGTALIKKYPKLESEFVYGDYKVYDVRKMIAKSEQEIGKATAKYFFYS
NIMNFFKTEITLANGEIRKRPLIETNGETGEIVWDKGRDFATVRKVLSMP
QVNIVKKTEVQTGGFSKESILPKRNSDKLIARKKDWDPKKYGGFDSPTVA
YSVLVVAKVEKGKSKKLKSVKELLGITIMERSSFEKNPIDFLEAKGYKEV
KKDLIIKLPKYSLFELENGRKRMLASAGELQKGNELALPSKYVNFLYLAS
HYEKLKGSPEDNEQKQLFVEQHKHYLDEIIEQISEFSKRVILADANLDKV
LSAYNKHRDKPIREQAENIIHLFTLTNLGAPAAFKYFDTTIDRKRYTSTK
EVLDATLIHQSITGLYETRIDLSQLGGDSGGSGGSGGSTNLSDIIEKETG
KQLVIQESILMLPEEVEEVIGNKPESDILVHTAYDESTDENVMLLTSDAP
EYKPWALVIQDSNGENKIKMLSGGSGGSGGSTNLSDIIEKETGKQLVIQE
SILMLPEEVEEVIGNKPESDILVHTAYDESTDENVMLLTSDAPEYKPWAL
VIQDSNGENKIKMLSGGSPKKKRKV

[0616] The ability of the base editing constructs of FIG. 109 to mutate target cytosine residues of EMX1, FANCF, HEK2, HEK3, HEK4, and RNF2 are shown in FIGS. 110-115. The percentage of target cytosines edited (including the proportion of C residues that are mutated to a T, A, or G), as well as the % of indels generated, are shown in FIGS. 110-115. The percentage of target cytosines edited were calculated using the following formula: 100-[% of sequencing reads with C]. The pie charts of FIGS. 110-115 show the distribution of reads with the various bases indicated, meaning that looking at all of the base edited reads (reads that have a nucleotide other than a C at the base indicated), what percentage of those have A, G, or T. Tables 9-14, below, show the values of the mutation percentages that are indicated by in the pie charts of FIGS. 110-115.

[0617] The C to non-T editing observed is likely due to UDG (uracil DNA glycosylase). For example, once the C is converted to the uracil intermediate, UDG can convert it to an abasic site. This abasic site is then processed by other endogenous enzymes and ultimately leads to indels or other bases (such as G or A) replacing the C. We have shown that in UDG knock-out cell lines show increased C to T editing with little to no indels at all.

TABLE 9
EMX1

| EMX1 | | C₅ |
|---|---|---|
| BE3 | A | 1.9% |
| | C | 51.9% |
| | G | 6.0% |
| | T | 40.3% |
| pmCDA1 | A | 0.2% |
| | C | 88.9% |
| | G | 0.8% |
| | T | 10.0% |
| hAID | A | 0.3% |
| | C | 83.6% |
| | G | 0.6% |
| | T | 15.4% |
| hAPOBEC3G | A | 0.0% |
| | C | 98.9% |
| | G | 0.2% |
| | T | 1.0% |
| BE4-N | A | 1.4% |
| | C | 85.6% |
| | G | 3.5% |
| | T | 9.5% |
| BE4-SSB | A | 0.3% |
| | C | 96.7% |
| | G | 0.7% |
| | T | 2.3% |
| BE4-(GGS)₃ | A | 1.7% |
| | C | 36.8% |
| | G | 4.1% |
| | T | 57.4% |
| BE4-XTEN | A | 2.1% |
| | C | 45.7% |
| | G | 5.1% |
| | T | 47.1% |
| BE4-32aa | A | 1.6% |
| | C | 46.3% |
| | G | 4.6% |
| | T | 47.5% |
| BE4-2XUGI | A | 0.6% |
| | C | 60.2% |
| | G | 1.9% |
| | T | 37.3% |

TABLE 10
FANCF

| FANCF | | C₈ |
|---|---|---|
| BE3 | A | 1.6% |
| | C | 74.4% |
| | G | 0.7% |
| | T | 23.3% |
| pmCDA1 | A | 0.5% |
| | C | 88.8% |
| | G | 0.3% |
| | T | 10.3% |
| hAID | A | 0.3% |
| | C | 89.6% |
| | G | 0.2% |
| | T | 9.9% |
| hAPOBEC3G | A | 2.1% |
| | C | 75.4% |
| | G | 10.4% |
| | T | 12.1% |
| BE4-N | A | 1.8% |
| | C | 83.5% |
| | G | 0.6% |
| | T | 14.2% |
| BE4-SSB | A | 0.3% |
| | C | 97.1% |
| | G | 0.1% |
| | T | 2.6% |
| BE4-(GGS)₃ | A | 2.3% |
| | C | 45.7% |
| | G | 1.4% |
| | T | 50.6% |
| BE4-XTEN | A | 1.1% |
| | C | 56.3% |
| | G | 0.4% |
| | T | 42.1% |
| BE4-32aa | A | 1.2% |
| | C | 70.0% |
| | G | 0.6% |
| | T | 28.2% |
| BE4-2XUGI | A | 0.9% |
| | C | 57.8% |
| | G | 1.1% |
| | T | 40.2% |

TABLE 11
HEK2

| HEK2 | | C₆ |
|---|---|---|
| BE3 | A | 0.9% |
| | C | 28.2% |
| | G | 52.9% |
| | T | 18.1% |
| pmCDA1 | A | 1.8% |
| | C | 73.5% |
| | G | 3.5% |
| | T | 21.2% |
| hAID | A | 2.1% |
| | C | 56.9% |
| | G | 7.7% |
| | T | 33.3% |
| hAPOBEC3G | A | 0.1% |
| | C | 86.5% |
| | G | 9.9% |
| | T | 3.5% |
| BE4-N | A | 1.0% |
| | C | 37.6% |
| | G | 57.0% |
| | T | 4.4% |
| BE4-SSB | A | 0.2% |
| | C | 78.4% |
| | G | 20.0% |
| | T | 1.4% |
| BE4-(GGS)₃ | A | 0.6% |
| | C | 11.1% |
| | G | 40.6% |
| | T | 47.7% |
| BE4-XTEN | A | 1.2% |
| | C | 24.8% |
| | G | 44.6% |
| | T | 29.4% |
| BE4-32aa | A | 1.1% |
| | C | 26.3% |
| | G | 41.8% |
| | T | 30.7% |
| BE4-2XUGI | A | 0.8% |
| | C | 37.0% |
| | G | 21.6% |
| | T | 40.6% |

TABLE 12
HEK3

| HEK3 | | C₅ |
|---|---|---|
| BE3 | A | 2.23% |
| | C | 38.06% |
| | G | 12.77% |
| | T | 46.95% |
| pmCDA1 | A | 0.21% |
| | C | 76.57% |
| | G | 0.12% |
| | T | 23.09% |
| hAID | A | 0.28% |
| | C | 60.23% |
| | G | 1.03% |
| | T | 38.45% |
| hAPOBEC3G | A | 3.11% |
| | C | 33.89% |
| | G | 28.59% |
| | T | 34.41% |
| BE4-N | A | 2.6% |
| | C | 64.1% |
| | G | 13.5% |
| | T | 19.8% |
| BE4-SSB | A | 0.4% |
| | C | 92.9% |
| | G | 2.8% |
| | T | 3.9% |
| BE4-(GGS)₃ | A | 1.3% |
| | C | 9.9% |
| | G | 7.9% |
| | T | 80.8% |
| BE4-XTEN | A | 2.3% |
| | C | 15.9% |
| | G | 12.2% |
| | T | 69.6% |
| BE4-32aa | A | 1.3% |
| | C | 14.9% |
| | G | 9.9% |
| | T | 73.9% |
| BE4-2XUGI | A | 0.6% |
| | C | 23.4% |
| | G | 3.8% |
| | T | 72.2% |

TABLE 13
HEK4

| HEK4 | | C₅ |
|---|---|---|
| BE3 | A | 8.40% |
| | C | 41.89% |
| | G | 24.54% |
| | T | 25.17% |
| pmCDA1 | A | 0.50% |
| | C | 87.53% |
| | G | 0.01% |
| | T | 11.95% |
| hAID | A | 0.93% |
| | C | 71.32% |
| | G | 0.69% |
| | T | 27.06% |
| hAPOBEC3G | A | 0.12% |
| | C | 99.37% |
| | G | 0.35% |
| | T | 0.16% |
| BE4-N | A | 7.3% |
| | C | 56.6% |
| | G | 25.7% |
| | T | 10.3% |
| BE4-SSB | A | 2.1% |
| | C | 86.8% |
| | G | 5.8% |
| | T | 5.2% |
| BE4-(GGS)₃ | A | 6.7% |
| | C | 13.0% |
| | G | 19.8% |
| | T | 60.5% |
| BE4-XTEN | A | 7.5% |
| | C | 19.7% |
| | G | 25.4% |
| | T | 47.4% |
| BE4-32aa | A | 7.9% |
| | C | 21.8% |
| | G | 25.1% |
| | T | 45.3% |
| BE4-2XUGI | A | 3.4% |
| | C | 22.2% |
| | G | 12.4% |
| | T | 62.0% |

TABLE 14
RNF2

| RNF2 | | C₆ |
|---|---|---|
| BE3 | A | 2.46% |
| | C | 46.65% |
| | G | 19.87% |
| | T | 31.03% |
| pmCDA1 | A | 0.60% |
| | C | 83.52% |
| | G | 1.33% |
| | T | 14.55% |
| hAID | A | 0.36% |
| | C | 75.03% |
| | G | 3.20% |
| | T | 21.40% |
| hAPOBEC3G | A | 0.10% |
| | C | 86.60% |
| | G | 3.70% |
| | T | 9.59% |
| BE4-N | A | 5.1% |
| | C | 50.0% |
| | G | 28.8% |
| | T | 16.2% |
| BE4-SSB | A | 1.1% |
| | C | 89.9% |
| | G | 4.9% |
| | T | 4.1% |
| BE4-(GGS)₃ | A | 2.0% |
| | C | 23.0% |
| | G | 14.0% |
| | T | 61.0% |
| BE4-XTEN | A | 2.6% |
| | C | 32.4% |
| | G | 16.0% |
| | T | 49.0% |
| BE4-32aa | A | 2.2% |
| | C | 29.2% |
| | G | 18.5% |
| | T | 50.0% |
| BE4-2XUGI | A | 0.7% |
| | C | 45.0% |
| | G | 6.5% |
| | T | 47.8% |

### Example 15: Base Editors Comprising a Cpf1 Nickase that Cleaves the Targeted Strand

[0618] As discussed above, nucleic acid programmable DNA binding proteins (napDNAbp) of any of the fusion proteins provided herein may be a Cpf1 protein. In some embodiments, the Cpf1 protein is a Cpf1 nickase (nCpf1). Cpf1 nickases, for example, a Cpf1 nickase (R1225A in AsCpf1; and R1138A in LbCpf1) that cleaves the non-target strand have been described in Yamano et al., “Crystal structure of Cpf1 in complex with guide RNA and target DNA.” Cell (165) 2016, p. 949-962; the entire contents of which is hereby incorporated by reference. However, a nickase (e.g., a Cpf1 nickase of a base editor protein) that cleaves the target strand is expected to improve base editing efficiency.

[0619] A fluorescent labeled DNA was used to identify a Cpf1 mutant that preferentially nicks the target strand, rather than the non-target strand (see FIG. 116). In FIG. 116, the top strand of DNA constructs 1-3, is the non-target strand and the bottom strand is the target strand. An in vitro assay is carried out using wild-type LbCpf1, R836A (LbCpf1), and R1138A (LbCpf1). R836A (LbCpf1) appears to be a “crippled” nickase, meaning it cuts the target strand more efficiently than the non-target strand. As shown in FIG. 117, the non-target strand is uncut, no fluorescent 350 piece is observed. After two hours, both strands are cut. Differing intensities suggest more target strands are cut than non-target strands.

Establishing a Base Editing Window with AsCp1-BE3

[0620] Base editing proteins (e.g., BE3 (SpCas9-BE3)) having LbCpf1(R836A) or AsCpf1(R912A) as the napDNAbp were shown to edit bases at low efficiency (0.1% to 0.4%). A base editor with a AsCpf1 (R912A) napDNAbp more efficiently mutated a target C at EMX1, FANCF, HEK3 and HEK4 sites. The editing window of the constructs tested appears to be from the 7^{th} base to the 11^{th} base. The numbers are consistent with the trend with BE3 having highest numbers and self-defeating BE (i.e., APOBEC-AsCpf1(R1225A)-UGI, which cleaves the non-target strand) having lower ones. See FIG. 118 Positive control with Cas9-BE3 on EMX1: 5-6%. Indel values for AsCpf1: >20%. R912 in AsCpf1 is conserved across many members of the Cpf1 family. The corresponding residue in LbCpf1 is R836, which is believed to be a “crippled” nickase when the R is mutated to an A.

### Optimization of Cpf1-BE (Linkers)

[0621] Indel data suggests that Cpf1 can access DNA target sites. Thus, optimization of Cpf1 base editing proteins has focused on specific APOBEC proteins, linkers, and/or UGI domains. The construct shown in FIG. 119 was tested, with varying linkers using both LbCpf1(R836A) and AsCpf1(R912A). In short, different linker sequences (i.e., XTEN, GGS, (GGS)₃ (SEQ ID NO: 610), (GGS)₅ (SEQ ID NO: 610), and (GGS)₇ (SEQ ID NO: 610)) between the APOBEC and Cpf1 domain (e.g., AsCpf1 or LbCpf1) were tested. See FIG. 120. The constructs were tested for their ability to mutate the C₈ residue of the HEK3 site, which is TGCTTCTC₈CAGCCCTGGCCTGG (SEQ ID NO: 592). Editing levels for base editing proteins with AsCpf1 reached to over 1%, while base editing proteins with LbCpf1 showed a comparative reduction in base editing efficiency. As shown in FIG. 121, linkers from a database maintained by the Centre of Integrative Bioinformatics VU did not show as significant an improvement as GGS-type linkers for AsCpf1-BE3. The linkers shown in FIG. 121 are shown below:

| | Length | |
|---|---|---|
| PDB_code | (aa) | Sequence |
| 1au7A_1 | 10 | KRRTTISIAA (SEQ ID NO: 593) |
| 1c1kA_1 | 19 | ALVFYREYIGRLKQIKFKF (SEQ ID NO: 594) |
| 1c20A_1 | 14 | LPIMAKSVLDLYEL (SEQ ID NO: 595) |
| 1ee8A_1 | 5 | LLRLG (SEQ ID NO: 596) |
| 1f1zA_1 | 15 | TDKEINPVVKENIEW (SEQ ID NO: 597) |
| 1ignA_1 | 8 | PPSIKRKF (SEQ ID NO: 598) |
| 1jmcA_1 | 9 | LPTVQFDFT (SEQ ID NO: 599) |
| 1sfe_1 | 14 | LPLDIRGTAFQQQV (SEQ ID NO: 600) |
| 2ezx_1 | 8 | AYVVLGQF (SEQ ID NO: 601) |
| 2reb_1 | 8 | INFYGELV (SEQ ID NO: 602) |

### Optimization of Cpf1-BE (Orientations)

[0622] Cas9 has a stretch of amino acids between the C and N termini (see red square, FIG. 123) while AsCpf1 does not (see FIG. 122). Moreover, AsCpf1 has a shorter distance between the N and C termini. These observations indicate potential interference between APOBEC (on N terminus) and UGI (on C terminus) through which UGI may hinder APOBEC access to the non-target strand. One solution is to move APOBEC and UGI onto the same terminus, either N or C. Accordingly, constructs having the architecture NLS-UGI-APOBEC-XTEN-AsCpf1; UGI-APOBEC-XTEN-AsCpf1-NLS; and AsCpf1-XTEN-APOBEC-NLS will be tested.

### Optimization of Cpf1-BE (Internal Truncation)

[0623] There is no known crystal structure of Cpf1 in which the non-target strand is resolved (see FIG. 124, cyan). It is believed that the editing window should lie within the red circle as shown in FIG. 124. There is a helical region (see square in FIG. 124) that may be obstructing APOBEC. This region comprises the amino acid sequence K(661)KTGDQK(667) (SEQ ID NO: 603).

[0624] To test the whether the removal of two, four or six residues improves base editing efficiency, experiments were conducted with a base editor having a AsCpf1(R912A) napDNAbp, using HEK3 as the target site. Editing levels increase to approximately 2.6%—a 6-fold increase from control levels when T663 and D665 are deleted (see Table 7, below). The construct used in this experiment was APOBEC-XTEN-AsCpf1(R912A)-SGGS-UGI

TABLE 7

| Deletions | Editing at C8 | Editing at C9 |
|---|---|---|
| T663, D665 | 2.59% | 1.29% |
| K662, T663, D665, Q666 | 0.15% | 0.15% |
| K661, K662, T663, D665, | 0.22% | 0.21% |
| Q666, K667 | | |

### REFERENCES

[0625] 1. Humbert O, Davis L, Maizels N. Targeted gene therapies: tools, applications, optimization. Crit Rev Biochem Mol. 2012; 47(3):264-81. PMID: 22530743.
[0626] 2. Perez-Pinera P, Ousterout D G, Gersbach C A. Advances in targeted genome editing. Curr Opin Chem Biol. 2012; 16(3-4):268-77. PMID: 22819644.
[0627] 3. Urnov F D, Rebar E J, Holmes M C, Zhang H S, Gregory P D. Genome editing with engineered zinc finger nucleases. Nat Rev Genet. 2010; 11(9):636-46. PMID: 20717154.
[0628] 4. Joung J K, Sander J D. TALENs: a widely applicable technology for targeted genome editing. Nat Rev Mol Cell Biol. 2013; 14(1):49-55. PMID: 23169466.
[0629] 5. Charpentier E, Doudna J A. Biotechnology: Rewriting a genome. Nature. 2013; 495,
[0630] (7439):50-1. PMID: 23467164.
[0631] 6. Pan Y, Xia L, Li A S, Zhang X, Sirois P, Zhang J, Li K. Biological and biomedical applications of engineered nucleases. Mol Biotechnol. 2013; 55(1):54-62. PMID: 23089945.
[0632] 7. De Souza, N. Primer: genome editing with engineered nucleases. Nat Methods. 2012; 9(1):27. PMID: 22312638.
[0633] 8. Santiago Y, Chan E, Liu P Q, Orlando S, Zhang L, Urnov F D, Holmes M C, Guschin D, Waite A, Miller J C, Rebar E J, Gregory P D, Klug A, Collingwood T N. Targeted gene knockout in mammalian cells by using engineered zinc-finger nucleases. Proc Natl Acad Sci USA. 2008; 105(15):5809-14. PMID: 18359850.
[0634] 9. Cargill M, Altshuler D, Ireland J, Sklar P, Ardlie K, Patil N, Lane C R, Lim E P, Kalyanaraman N, Nemesh J, Ziaugra L, Friedland L, Rolfe A, Warrington J, Lipshutz R, Daley G Q, Lander E S. Characterization of single-nucleotide polymorphisms in coding regions of human genes. Nat Genet. 1999; 22(3):231-8. PMID: 10391209.
[0635] 10. Jansen R, van Embden J D, Gaastra W, Schouls L M. Identification of genes that are associated with DNA repeats in prokaryotes. Mol Microbiol. 2002; 43(6):1565-75. PMID: 11952905.
[0636] 11. Mali P, Esvelt K M, Church G M. Cas9 as a versatile tool for engineering biology. Nat Methods. 2013; 10(10):957-63. PMID: 24076990.
[0637] 12. Jore M M, Lundgren M, van Duijin E, Bultema J B, Westra E R, Waghmare S P, Wiedenheft B, Pul U, Wurm R, Wagner R, Beijer M R, Barendregt A, Shou K, Snijders A P, Dickman M J, Doudna J A, Boekema E J, Heck A J, van der Oost J, Brouns S J. Structural basis for CRISPR RNA-guided DNA recognition by Cascade. Nat Struct Mol Biol. 2011; 18(5):529-36. PMID: 21460843.
[0638] 13. Horvath P, Barrangou R. CRISPR/Cas, the immune system of bacteria and archaea. Science. 2010; 327(5962):167-70. PMID: 20056882.
[0639] 14. Wiedenheft B, Sternberg S H, Doudna J A. RNA-guided genetic silencing systems in bacteria and archaea. Nature. 2012; 482(7385):331-8. PMID: 22337052.
[0640] 15. Gasiunas G, Siksnys V. RNA-dependent DNA endonuclease Cas9 of the CRISPR system: Holy Grail of genome editing? Trends Microbiol. 2013; 21(11):562-7. PMID: 24095303.
[0641] 16. Qi L S, Larson M H, Gilbert L A, Doudna J A, Weissman J S, Arkin A P, Lim W A. Repurposing CRISPR as an RNA-guided platform for sequence-specific control of gene expression. Cell. 2013; 152(5):1173-83. PMID: 23452860.
[0642] 17. Perez-Pinera P, Kocak D D, Vockley C M, Adler A F, Kabadi A M, Polstein L R, Thakore P I, Glass K A, Ousterout D G, Leong K W, Guilak F, Crawford G E, Reddy T E, Gersbach C A. RNA-guided gene activation by CRISPR-Cas9-based transcription factors. Nat Methods. 2013; 10(10):973-6. PMID: 23892895.
[0643] 18. Mali P, Aach J, Stranges P B, Esvelt K M, Moosburner M, Kosuri S, Yang L, Church G M. CAS9 transcriptional activators for target specificity screening and paired nickases for cooperative genome engineering. Nat Biotechnol. 2013; 31(9):833-8. PMID: 23907171.
[0644] 19. Gilbert L A, Larson M H, Morsut L, Liu Z, Brar G A, Torres S E, Stern-Ginossar N, Brandman O, Whitehead E H, Doudna J A, Lim W A, Weissman J S, Qi L S. CRISPR-mediated modular RNA-guided regulation of transcription in eukaryotes. Cell. 2013; 154(2):442-51. PMID: 23849981.
[0645] 20. Larson M H, Gilbert L A, Wang X, Lim W A, Weissman J S, Qi L S. CRISPR interference (CRISPRi) for sequence-specific control of gene expression. Nat Protoc. 2013; 8(11):2180-96. PMID: 24136345.
[0646] 21. Mali P, Yang L, Esvelt K M, Aach J, Guell M, DiCarlo J E, Norville J E, Church G M. RNA-guided human genome engineering via Cas9. Science. 2013; 339(6121):823-6. PMID: 23287722.
[0647] 22. Cole-Strauss A, Yoon K, Xiang Y, Byrne B C, Rice M C, Gryn J, Holloman W K, Kmiec E B. Correction of the mutation responsible for sickle cell anemia by an RNA-DNA oligonucleotide. Science. 1996; 273(5280):1386-9. PMID: 8703073.
[0648] 23. Tagalakis A D, Owen J S, Simons J P. Lack of RNA-DNA oligonucleotide (chimeraplast) mutagenic activity in mouse embryos. Mol Reprod Dev. 2005; 71(2):140-4. PMID: 15791601.
[0649] 24. Ray A, Langer M. Homologous recombination: ends as the means. Trends Plant Sci. 2002; 7(10):435-40. PMID 12399177.
[0650] 25. Britt A B, May G D. Re-engineering plant gene targeting. Trends Plant Sci. 2003; 8(2):90-5. PMID: 12597876.
[0651] 26. Vagner V, Ehrlich S D. Efficiency of homologous DNA recombination varies along the Bacillus subtilis chromosome. J Bacteriol. 1988; 170(9):3978-82. PMID: 3137211.
[0652] 27. Saleh-Gohari N, Helleday T. Conservative homologous recombination preferentially repairs DNA double-strand breaks in the S phase of the cell cycle in human cells. Nucleic Acids Res. 2004; 32(12):3683-8. PMID: 15252152.
[0653] 28. Lombardo A, Genovese P, Beausejour C M, Colleoni S, Lee Y L, Kim K A, Ando D, Urnov F D, Galli C, Gregory P D, Holmes M C, Naldini L. Gene editing in human stem cells using zinc finger nucleases and integrase-defective lentiviral vector delivery. Nat Biotechnol. 2007; 25(11):1298-306. PMID: 17965707.
[0654] 29. Conticello S G. The AID/APOBEC family of nucleic acid mutators. Genome Biol. 2008; 9(6):229. PMID: 18598372.
[0655] 30. Reynaud C A, Aoufouchi S, Faili A, Weill J C. What role for AID: mutator, or assembler of the immunoglobulin mutasome? Nat Immunol. 2003; 4(7):631-8.
[0656] 31. Bhagwat A S. DNA-cytosine deaminases: from antibody maturation to antiviral defense. DNA Repair (Amst). 2004; 3(1):85-9. PMID: 14697763.
[0657] 32. Navaratnam N, Sarwar R. An overview of cytidine deaminases. Int J Hematol. 2006; 83(3):195-200. PMID: 16720547.
[0658] 33. Holden L G, Prochnow C, Chang Y P, Bransteitter R, Chelico L, Sen U, Stevens R C, Goodman M F, Chen X S. Crystal structure of the anti-viral APOBEC3G catalytic domain and functional implications. Nature. 2008; 456(7218):121-4. PMID: 18849968.
[0659] 34. Chelico L, Pham P, Petruska J, Goodman M F. Biochemical basis of immunological and retroviral responses to DNA-targeted cytosine deamination by activation-induced cytidine deaminase and APOBEC3G. J Biol Chem. 2009; 284(41). 27761-5. PMID: 19684020.
[0660] 35. Pham P, Bransteitter R, Goodman M F. Reward versus risk: DNA cytidine deaminases triggering immunity and disease. Biochemistry. 2005; 44(8):2703-15. PMID 15723516.
[0661] 36. Chen X, Zaro J L, Shen W C. Fusion protein linkers: property, design and functionality. Adv Drug Deliv Rev. 2013; 65(10):1357-69. PMID: 23026637.
[0662] 37. Lee J W, Soung Y H, Kim S Y, Lee H W, Park W S, Nam S W, Kim S H, Lee J Y, Yoo N J, Lee S H. PIK3C A gene is frequently mutated in breast carcinomas and hepatocellular carcinomas. Oncogene. 2005; 24(8):1477-80. PMID: 15608678.
[0663] 38. Ikediobi O N, Davies H, Bignell G, Edkins S, Stevens C, O'Meara S, Santarius T, Avis T, Barthorpe S, Brackenbury L, Buck G, Butler A, Clements J, Cole J, Dicks E, Forbes S, Gray K, Halliday K, Harrison R, Hills K, Hinton J, Hunter C, Jenkinson A, Jones D, Kosmidou V, Lugg R, Menzies A, Mironenko T, Parker A, Perry J, Raine K, Richardson D, Shepherd R, Small A, Smith R, Solomon H, Stephens P, Teague J, Tofts C, Varian J, Webb T, West S, Widaa S, Yates A, Reinhold W, Weinstein J N, Stratton M R, Futreal P A, Wooster R. Mutation analysis of 24 known cancer genes in the NCI-60 cell line set. Mol Cancer Ther. 2006; 5(11):2606-12. PMID: 17088437.
[0664] 39. Cox, D. B., Platt, R. J. & Zhang, F. Therapeutic genome editing: prospects and challenges. Nature medicine 21, 121-131, doi:10.1038/nm.3793 (2015).
[0665] 40. Hilton, I. B. & Gersbach, C. A. Enabling functional genomics with genome engineering. Genome research 25, 1442-1455, doi:10.1101/gr.190124.115 (2015).
[0666] 41. Sander, J. D. & Joung, J. K. CRISPR-Cas systems for editing, regulating and targeting genomes. Nature biotechnology 32, 347-355, doi:10.1038/nbt.2842 (2014).
[0667] 42. Maruyama, T. et al. Increasing the efficiency of precise genome editing with CRISPR-Cas9 by inhibition of nonhomologous end joining. Nature biotechnology 33, 538-542, doi:10.1038/nbt.3190 (2015).
[0668] 43. Chu, V. T. et al. Increasing the efficiency of homology-directed repair for CRISPR-Cas9-induced precise gene editing in mammalian cells. Nature biotechnology 33, 543-548, doi:10.1038/nbt.3198 (2015).
[0669] 44. Lin, S., Staahl, B. T., Alla, R. K. & Doudna, J. A. Enhanced homology-directed human genome engineering by controlled timing of CRISPR/Cas9 delivery. eLife 3, e04766, doi:10.7554/eLife.04766 (2014).
[0670] 45. Cong, L. et al. Multiplex genome engineering using CRISPR/Cas systems. Science 339, 819-823, doi:10.1126/science.1231143 (2013).
[0671] 46. Rong, Z., Zhu, S., Xu, Y. & Fu, X. Homologous recombination in human embryonic stem cells using CRISPR/Cas9 nickase and a long DNA donor template. Protein & cell 5, 258-260, doi:10.1007/s13238-014-0032-5 (2014).
[0672] 47. Jinek, M. et al. A Programmable Dual-RNA-Guided DNA Endonuclease in Adaptive Bacterial Immunity. Science 337, 816-821, doi:10.1126/science.1225829 (2012).
[0673] 48. Harris, R. S., Petersen-Mahrt, S. K. & Neuberger, M. S. RNA Editing Enzyme APOBEC1 and Some of Its Homologs Can Act as DNA Mutators. Molecular Cell 10, 1247-1253 (2002).
[0674] 49. Jinek, M. et al. Structures of Cas9 endonucleases reveal RNA-mediated conformational activation. Science 343, 1247997, doi:10.1126/science.1247997 (2014).
[0675] 50. Schellenberger, V. et al. A recombinant polypeptide extends the in vivo half-life of peptides and proteins in a tunable manner. Nature biotechnology 27, 1186-1190, doi:10.1038/nbt.1588 (2009).
[0676] 51. Saraconi, G., Severi, F., Sala, C., Mattiuz, G. & Conticello, S. G. The RNA editing enzyme APOBEC1 induces somatic mutations and a compatible mutational signature is present in esophageal adenocarcinomas. Genome biology 15, 417-(2014).
[0677] 52. Anders, C., Niewoehner, O., Duerst, A. & Jinek, M. Structural basis of PAM-dependent target DNA recognition by the Cas9 endonuclease. Nature 513, 569-573, doi:10.1038/nature13579 (2014).
[0678] 53. Cong, L. et al. Multiplex genome engineering using CRISPR/Cas systems. Science 339, 819-823 (2013).
[0679] 54. Tsai, S. Q. et al. GUIDE-seq enables genome-wide profiling of off-target cleavage by CRISPR-Cas nucleases. Nature biotechnology 33, 187-197, doi:10.1038/nbt.3117 (2015).
[0680] 55. Kunz, C., Saito, Y. & Schar, P. DNA Repair in mammalian cells: Mismatched repair: variations on a theme. Cellular and molecular life sciences: CMLS 66, 1021-1038, doi:10.1007/s00018-009-8739-9 (2009).
[0681] 56. D., M. C. et al. Crystal structure of human uracil-DNA glycosylase in complex with a protein inhibitor: protein mimicry of DNA. Cell 82, 701-708 (1995).
[0682] 57. Caldecott, K. W. Single-strand break repair and genetic disease. Nature reviews. Genetics 9, 619-631, doi:10.1038/nrg2380 (2008).
[0683] 58. Fukui, K. DNA mismatch repair in eukaryotes and bacteria. Journal of nucleic acids 2010, doi:10.4061/2010/260512 (2010).
[0684] 59. Gasiunas, G., Barrangou, R., Horvath, P. & Siksnys, V. Cas9-crRNA ribonucleoprotein complex mediates specific DNA cleavage for adaptive immunity in bacteria. Proceedings of the National Academy of Sciences 109, E2579-E2586, doi:10.1073/pnas.1208507109 (2012).
[0685] 60. Ran, F. A. et al. In vivo genome editing using Staphylococcus aureus Cas9. Nature 520, 186-191, doi:10.1038/nature14299 (2015).
[0686] 61. Kuscu, C., Arslan, S., Singh, R., Thorpe, J. & Adli, M. Genome-wide analysis reveals characteristics of off-target sites bound by the Cas9 endonuclease. Nature biotechnology 32, 677-683, doi:10.1038/nbt.2916 (2014).
[0687] 62. Wu, X. et al. Genome-wide binding of the CRISPR endonuclease Cas9 in mammalian cells. Nature biotechnology 32, 670-676, doi:10.1038/nbt.2889 (2014).
[0688] 63. Beale, R. C. L. et al. Comparison of the Differential Context-dependence of DNA Deamination by APOBEC Enzymes: Correlation with Mutation Spectra in Vivo. Journal of Molecular Biology 337, 585-596, doi:10.1016/j.jmb.2004.01.046 (2004).
[0689] 64. Kim, J., Basak, J. M. & Holtzman, D. M. The role of apolipoprotein E in Alzheimer's disease. Neuron 63, 287-303, doi:10.1016/j.neuron.2009.06.026 (2009).
[0690] 65. Liu, C. C., Kanekiyo, T., Xu, H. & Bu, G. Apolipoprotein E and Alzheimer disease: risk, mechanisms and therapy. Nature reviews. Neurology 9, 106-118, doi:10.1038/nrneuro1.2012.263 (2013).
[0691] 66. Sjöblom, T. et al. The Consensus Coding Sequences of Human Breast and Colorectal Cancers. Science 314, 268-274, doi:10.1126/science.1133427 (2006).
[0692] 67. Stephens, P. J. et al. The landscape of cancer genes and mutational processes in breast cancer. Nature 486, 400-404, doi:10.1038/nature11017 (2012).
[0693] 68. Landrum, M. J. et al. ClinVar: public archive of interpretations of clinically relevant variants. Nucleic Acids Research, doi:10.1093/nar/gkv1222 (2015).
[0694] 69. Slaymaker, I. M. et al. Rationally engineered Cas9 nucleases with improved specificity. Science, doi:10.1126/science.aad5227 (2015).
[0695] 70. Davis, K. M., Pattanayak, V., Thompson, D. B., Zuris, J. A. & Liu, D. R. Small molecule-triggered Cas9 protein with improved genome-editing specificity. Nature chemical biology 11, 316-318, doi:10.1038/nchembio.1793 (2015).
[0696] 71. Zuris, J. A. et al. Cationic lipid-mediated delivery of proteins enables efficient protein-based genome editing in vitro and in vivo. Nature biotechnology 33, 73-80, doi:10.1038/nbt.3081 (2015).
[0697] 72. Kleinstiver, B. P. et al. Engineered CRISPR-Cas9 nucleases with altered PAM specificities. Nature 523, 481-485, doi:10.1038/nature14592 (2015).
[0698] 73. Pattanayak, V. et al. High-throughput profiling of off-target DNA cleavage reveals RNA-programmed Cas9 nuclease specificity. Nature Biotechnology 31, 839-843, doi:10.1038/nbt.2673 (2013).
[0699] 74. Shcherbakova, D. M. & Verkhusha, V. V. Near-infrared fluorescent proteins for multicolor in vivo imaging. Nature Methods 10, 751-754, doi:10.1038/nmeth.2521 (2013).
[0700] 75. Ran, F. A. et al. Genome engineering using the CRISPR-Cas9 system. Nat. Protocols 8, 2281-2308, doi:10.1038/nprot.2013.143 (2013).
[0701] 76. Jiang, F. et al. Structures of a CRISPR-Cas9 R-loop complex primed for DNA cleavage. Science, doi:10.1126/science.aad8282 (2016).
[0702] 77. Tsai, S. Q. et al. Dimeric CRISPR RNA-guided FokI nucleases for highly specific genome editing. Nat Biotech 32, 569-576, doi:10.1038/nbt.2908 (2014).
[0703] 78. Lieber, M. R., Ma, Y., Pannicke, U. & Schwarz, K. Mechanism and regulation of human non-homologous DNA end-joining. Nat Rev Mol Cell Biol 4, 712-720 (2003).
[0704] 79. Heller, R. C. & Marians, K. J. Replisome assembly and the direct restart of stalled replication forks. Nat Rev Mol Cell Biol 7, 932-943 (2006).
[0705] 80. Pluciennik, A. et al. PCNA function in the activation and strand direction of MutLα endonuclease in mismatch repair. Proceedings of the National Academy of Sciences of the United States of America 107, 16066-16071, doi:10.1073/pnas.1010662107 (2010).
[0706] 81. Seripa, D. et al. The missing ApoE allele. Annals of human genetics 71, 496-500, doi:10.1111/j.1469-1809.2006.00344.x (2007).
[0707] 82. Kleinstiver, B. P. et al. High-fidelity CRISPR-Cas9 nucleases with no detectable genome-wide off-target effects. Nature 529, 490-495, doi:10.1038/nature16526 (2016).
[0708] 83. Richardson, C. D., Ray, G. J., DeWitt, M. A., Curie, G. L. & Corn, J. E. Enhancing homology-directed genome editing by catalytically active and inactive CRISPR-Cas9 using asymmetric donor DNA. Nat Biotech 34, 339-344, doi:10.1038/nbt.3481 (2016).
[0709] 84. Simonelli, V., Narciso, L., Dogliotti, E. & Fortini, P. Base excision repair intermediates are mutagenic in mammalian cells. Nucleic acids research 33, 4404-4411, doi:10.1093/nar/gki749 (2005).
[0710] 85. Barnes, D. E. & Lindahl, T. Repair and Genetic Consequences of Endogenous DNA Base Damage in Mammalian Cells. Annual Review of Genetics 38, 445-476, doi:doi:10.1146/annurev.genet.38.072902.092448 (2004).

### Example 16: Improving DNA Specificity and Applicability of Base Editing Through Protein Engineering and Protein Delivery

[0711] Base editing, a genome editing approach that enables the programmable conversion of one base pair into another without double-stranded DNA cleavage, excess stochastic insertions and deletions, or dependence on homology-directed repair was developed. The application of base editing is limited by off-target activity and reliance on intracellular DNA delivery. Here two advances are described that address these limitations. First, off-target base editing has been reduced by installing mutations into the third-generation base editor (BE3) to generate a high-fidelity base editor (HF-BE3). Next, BE3 and HF-BE3 are purified and delivered as ribonucleoprotein (RNP) complexes into mammalian cells, establishing DNA-free base editing. RNP delivery of BE3 confers higher specificity even than plasmid transfection of HF-BE3, while maintaining comparable on-target editing levels. Finally, these advances are applied to deliver BE3 RNPs into both zebrafish embryos and the inner ear of live mice to achieve specific, DNA-free base editing in vivo.

### INTRODUCTION

[0712] Traditional genome editing agents introduce double-stranded DNA breaks (DSBs) as the first step of genome editing¹⁻⁴. Cells respond to DSBs primarily through non-homologous end joining (NHEJ), resulting in stochastic insertions or deletions (indels) at the cleavage site^{1,5}. To generate more precise changes in genomic DNA, homology-directed repair (HDR) can be used to replace the genomic DNA surrounding the cleavage site with that of an exogenously supplied DNA donor template⁶⁻⁸. Unfortunately, HDR is typically accompanied by an excess of indels resulting from competing NHEJ and is limited primarily to mitotic cells. In addition, most genome editing methods rely on delivery of exogenous plasmid or viral DNA into mammalian cells followed by intracellular expression of the agent⁹⁻¹². These delivery methods result in continuous, uncontrolled Cas9 and sgRNA expression even after the on-target locus has been edited, increasing the opportunity for genome editing at off-target loci^{1,13}.

[0713] Base editing, a different approach to genome editing that enables the direct, programmable, targeted conversion of a C:G base pair to a T:A base pair, was recently described^{3,14}. The third-generation base editor, BE3, contains in a single protein (i) a catalytically impaired Cas9 that opens a small single-stranded DNA bubble at a guide RNA-specified locus, (ii) a tethered single-strand-specific cytidine deaminase that converts C to U within a window of approximately five nucleotides in the single-stranded DNA bubble, (iii) a uracil glycosylase inhibitor (UGI) that inhibits base excision repair, thereby improving the efficiency and product selectivity of base editing, and (iv) nickase activity to manipulate cellular mismatch repair into replacing the G-containing DNA strand. The combination of these components enables efficient and permanent C to T (or G to A) conversion in mammalian cells with minimal indel formation. Since prefiously reported¹⁴, other researchers have confirmed the ability of this strategy and related approaches to facilitate Cas9-directed C to T conversion in mammalian cells¹⁵⁻¹⁷ and in plants¹⁸.

[0714] Here, two advances that greatly improve the DNA specificity of base editing and that allow base editing in vitro and in vivo without supplying exogenous DNA, which has been associated with a risk of recombination with the host genome and cytotoxicity, are described^{18,19}. First, a mutant form of BE3 incorporating mutations known to decrease the DNA affinity of Cas9²⁰ that reduces off-target editing events with only a modest decrease in on-target editing activity is engineered. Next, it is revealed that lipid-mediated delivery of base editor proteins complexed with guide RNA results in even larger specificity enhancements with no apparent reduction in on-target base editing compared to plasmid DNA delivery. Delivery of base editors as RNPs typically reduces off-target editing to below measurable levels, even for a notoriously promiscuous guide RNA that targets a highly repetitive genomic DNA sequence, in cultured human and mouse cells. These advances enable highly specific, DNA-free in vivo base editing in mice and zebrafish to be demonstrated.

### Results

### Engineering a High-Fidelity Base Editor

[0715] Cas9 nucleases and their associated fusion constructs have been shown to bind and cleave DNA at off-target genomic loci²¹⁻²⁴. Joung and coworkers developed HF-Cas9, a high-fidelity SpCas9 variant containing four point mutations (N497A, R661A, Q695A, Q926A) that were designed to eliminate non-specific interactions between Cas9 and the phosphate backbone of the DNA target strand (FIG. 125A)²⁰ consistent with the previous abrogation of non-specific DNA interactions in TALENs that greatly increased their DNA cleavage specificity²⁵. Since base editors operate on the non-target strand within the single-stranded DNA bubble created by Cas9¹⁴ it can be hypothesized that introducing these four point mutations from HF-Cas9 into BE3 to generate “HF-BE3” might reduce off-target base editing without altering its base conversion capabilities (FIGS. 125A and 125C).

[0716] Plasmids encoding BE3 and HF-BE3 as His₆-tagged proteins were overexpressed in E. coli and purified first by nickel affinity chromatography and then by cation exchange chromatography (FIGS. 126A-126B). Following extensive optimization of expression and purification conditions, BE3 and HF-BE3 protein can be routinely produced at a yield of ˜2 mg per liter of culture media (FIGS. 126A-126C).

[0717] The purified base editor proteins were used to compare base editing efficiency and the width of the editing window of HF-BE3 and BE3 biochemically. In vitro C to U conversion efficiencies were measured in a synthetic dsDNA 79-mer with a protospacer comprised of TC repeats. The target dsDNA (250 nM) was incubated with BE3:sgRNA or HF-BE3:sgRNA (2 μM) for 30 min at 37° C. After incubation, the edited DNA was amplified using a uracil-tolerant polymerase and sequenced by high-throughput DNA sequencing (HTS). Comparable editing efficiencies and activity window widths were observed for HF-BE3 and BE3 in vitro (FIG. 125B). These findings indicate that introduction of the high-fidelity mutations into BE3 does not compromise inherent on-target base editing efficiency or change the width of the editing window of the resulting HF-BE3 protein in vitro.

### HF-BE3 Enhances Editing Specificity Following DNA Transfection

[0718] Next, base editing efficiencies, specificities, and editing window widths of BE3 and HF-BE3 were compared in mammalian cells following plasmid DNA transfection. Four well-studied endogenous genomic loci (HEK293 site 3, FANCF, EMX1 and VEGFA site 2) were chosen to interrogate on- and off-target base editing in mammalian cells^{14,24}. VEGFA site 2 is highly repetitive, containing 14 Cs out of 20 protospacer nucleotides, and is associated with notoriously high rate of known off-target genome editing^{20,22,24,26}. This site was chosen to be included because it poses a formidable specificity challenge. In contrast with most nuclease-based genome editing applications, base editing relies on the precise location of the protospacer to place the target nucleotide within the editing window and usually little or no flexibility in the choice of guide RNA is available. Therefore, the development of base editors with enhanced specificities even for highly repetitive, promiscuous sgRNA targets is crucial^{3,14}.

[0719] The on-target locus and known off-target loci were amplified by PCR and analyzed by HTS following plasmid transfection²⁴ with each of the four base editor:sgRNA pairs. On-target editing in HEK293T cells for these four endogenous genomic loci was slightly reduced by introduction of the HF mutations; editing averaged 29±5% with BE3, and 21±3% (mean±s.e.m. for n=3 biological replicates) for HF-BE3 (FIGS. 127A-127D, 128A).

[0720] For each of the three standard, non-repetitive target sites (HEK293 site 3, FANCF, and EMX1), the three most frequently modified off-target loci that contain a C within the editing window from the off-target loci previously reported to be modified from treatment with Cas9 and the same guide RNA were examined (Table 15)²⁴. When cells were transfected with BE3 plasmid, C→T conversion across the nine most frequently modified Cas9 off-target loci for HEK293 site 3, FANCF, and EMX1 averaged 1.1±0.3% (FIGS. 127A-C; mean±s.d. for n=3 biological replicates). Installation of the HF mutations reduced the absolute level of mean off-target editing by 37-fold to 0.03±0.005%, with only one instance of measureable off-target C→T conversion (FIG. 127A; EMX1 C₅ at off-target 1).

TABLE 15
Protospacer and PAM sequences for the on- and off-target human genomic loci studied
in this work. The off-target sites were chosen based on their GUIDE-Seq read count ⁴⁵. Cytosines
within the editing window for a particular sgRNA are numbered. The PAM sequence is shown in
bold. Protospacer bases in off-target loci that differ from their respective on-target loci have been
underlined. For genomic sequences interrogated in murine samples, see FIG. 132E.

| | | | GUIDE-Seq |
|---|---|---|---|
| Site | Sequence | SEQ ID NO | count |
| EMX1 on-target | GAGTC₅C₆GAGCAGAAGAAGAAGGG | 480 | 4,521 |
| EMX1 off-target 1 | GAGTC₅TAAGCAGAAGAAGAAGAG | 481 | 1,445 |
| EMX1 off-target 2 | GAGGC₅C₆GAGCAGAAGAAAGACGG | 482 | 700 |
| EMX1 off-target 3 | GAGTC₅C₆TAGCAGGAGAAGAAGAG | 483 | 390 |
| HEK293 site 3 on-target | GGCC₄C₅AGACTGAGCACGTGATGG | 484 | 2,074 |
| HEK293 site 3 off-target 1 | CACC₄C₅AGACTGAGCACGTGCTGG | 485 | 327 |
| HEK293 site 3 off-target 2 | GACAC₅AGACTGGGCACGTGAGGG | 486 | 306 |
| HEK293 site 3 off-target 3 | AGCTC₅AGACTGAGCAAGTGAGGG | 487 | 136 |
| VEGFA site 2 on-target | GAC₃C₄C₅C₆C₇TC₉C₁₀ACCCCGCCTCC | 488 | 540 |
| | GG | | |
| VEGFA site 2 off-target 1 | CTAC₄C₅C₆C₇TC₉C₁₀ACCCCGCCTCCG | 489 | 1,925 |
| | G | | |
| VEGFA site 2 off-target 2 | [chemical structure] | 490 | 1,549 |
| | G | | |
| VEGFA site 2 off-target 3 | [chemical structure] | 491 | 1,178 |
| | GG | | |
| VEGFA site 2 off-target 4 | [chemical structure] | 492 | 1,107 |
| | GG | | |
| FANCF on-target | GGAATC₆C₇C₈TTC₁₁TGCAGCACCTGG | 493 | 4,816 |
| FANCF off-target 1 | [chemical structure] | 494 | 2,099 |
| | G | | |
| FANCF off-target 2 | [chemical structure] | 495 | 524 |
| | G | | |
| FANCF off-target 3 | [chemical structure] | 496 | 150 |
| | G | | |

[0721] To characterize HF-BE3 specificity on an extremely challenging site, BE3 and HF-BE3 off-target activity when targeting the highly repetitive VEGFA site 2 locus was compared. BE3 treatment lead to an average of 15±5% editing of cytosines located in the activity windows of the four tested off-target sites associated with this sgRNA (all average values quoted in this paragraph represent mean±s.d. for n=3 biological replicates). In contrast, HF-BE3 lead to a 3-fold reduction in absolute off-target editing (5.0±2.3%) at the same off-target sites (FIG. 127D). When compared to transfection of BE3, HF-BE3 significantly (p<0.05, two-tailed Student's t test) reduced off-target editing at 27 of the 57 cytosines located at off-target loci (Table 16), while HF-BE3 treatment lead to a significant reduction (p<0.05 two-tailed Student's t test) in on-target editing at only 3 of 16 the interrogated on-target cytosine residues.

TABLE 16
P-values for differences in base editing under different treatment conditions at all loci
evaluated in this study. p-values were calculated using the Student's two tailed t-test as described
in the Materials and Methods. When the p-value indicated a significant difference (p < 0.05), the
corresponding entry has been highlighted.
P values (Student's two-tailed t-test) for comparisons between listed treatments

| | | | plasmid | | | plasmid | | | | |
|---|---|---|---|---|---|---|---|---|---|---|
| | plasmid | | BE3 | | plasmid | HF- | | | | |
| Locus | BE3 vs | plasmid | vs | plasmid | HF-BE3 | BE3 vs | plasmid | protein | | protein |
| and | plasmid | BE3 vs | protein | BE3 | vs | protein | HF- | BE3 vs | protein | HF-BE3 |
| cytosine | HF- | protein | HF- | vs | protein | HF- | BE3 vs | protein | BE3 vs | vs |
| position | BE3 | BE3 | BE3 | control | BE3 | BE3 | control | HF-BE3 | control | control |
| EMX1, | 0.053 | 0.000 | 0.001 | 0.000 | 0.416 | 0.056 | 0.003 | 0.023 | 0.000 | 0.000 |
| C5 | | | | | | | | | | |
| EMX1, | 0.065 | 0.000 | 0.000 | 0.000 | 0.445 | 0.023 | 0.004 | 0.001 | 0.000 | 0.003 |
| C6 | | | | | | | | | | |
| FANCF, | 0.152 | 0.017 | 0.003 | 0.000 | 0.137 | 0.003 | 0.000 | 0.002 | 0.000 | 0.004 |
| C6 | | | | | | | | | | |
| FANCF, | 0.591 | 0.554 | 0.007 | 0.000 | 0.137 | 0.003 | 0.000 | 0.002 | 0.000 | 0.004 |
| C7 | | | | | | | | | | |
| FANCF, | 0.011 | 0.026 | 0.004 | 0.000 | 0.958 | 0.018 | 0.000 | 0.023 | 0.000 | 0.007 |
| C8 | | | | | | | | | | |
| FANCF, | 0.524 | 0.948 | 0.019 | 0.001 | 0.363 | 0.010 | 0.000 | 0.010 | 0.000 | 0.021 |
| C11 | | | | | | | | | | |
| HEK | 0.061 | 0.001 | 0.071 | 0.000 | 0.002 | 0.002 | 0.005 | 0.00199 | 0.001 | 0.003 |
| site 3, | | | | | | | | | | |
| C3 | | | | | | | | | | |
| HEK | 0.048 | 0.924 | 0.010 | 0.004 | 0.001 | 0.001 | 0.001 | 0.00004 | 0.000 | 0.001 |
| site 3, | | | | | | | | | | |
| C4 | | | | | | | | | | |
| HEK | 0.291 | 0.592 | 0.016 | 0.006 | 0.243 | 0.243 | 0.002 | 0.00022 | 0.000 | 0.001 |
| site 3, | | | | | | | | | | |
| C5 | | | | | | | | | | |
| VEGFA | 0.060 | 0.416 | 0.239 | 0.010 | 0.042 | 0.280 | 0.002 | 0.475 | 0.002 | 0.018 |
| site 2, | | | | | | | | | | |
| C3 | | | | | | | | | | |
| VEGFA | 0.036 | 0.191 | 0.047 | 0.004 | 0.032 | 0.803 | 0.002 | 0.066 | 0.000 | 0.005 |
| site 2, | | | | | | | | | | |
| C4 | | | | | | | | | | |
| VEGFA | 0.098 | 0.650 | 0.028 | 0.003 | 0.044 | 0.169 | 0.002 | 0.004 | 0.000 | 0.001 |
| site 2, | | | | | | | | | | |
| C5 | | | | | | | | | | |
| VEGFA | 0.452 | 0.781 | 0.118 | 0.004 | 0.165 | 0.239 | 0.002 | 0.013 | 0.000 | 0.001 |
| site 2, | | | | | | | | | | |
| C6 | | | | | | | | | | |
| VEGFA | 0.401 | 0.683 | 0.172 | 0.003 | 0.120 | 0.454 | 0.002 | 0.026 | 0.000 | 0.002 |
| site 2, | | | | | | | | | | |
| C7 | | | | | | | | | | |
| VEGFA | 0.225 | 0.308 | 0.254 | 0.004 | 0.504 | 0.828 | 0.004 | 0.624 | 0.000 | 0.002 |
| site 2, | | | | | | | | | | |
| C9 | | | | | | | | | | |
| VEGFA | 0.064 | 0.061 | 0.023 | 0.005 | 0.732 | 0.257 | 0.009 | 0.057 | 0.000 | 0.003 |
| site 2, | | | | | | | | | | |
| C10 | | | | | | | | | | |
| EMX1, | 0.003 | 0.003 | 0.002 | 0.002 | 0.119 | 0.036 | 0.035 | 0.269 | 0.255 | 0.643 |
| C5 off- | | | | | | | | | | |
| target 1 | | | | | | | | | | |
| EMX1, | 0.013 | 0.013 | 0.013 | 0.013 | 0.158 | 0.294 | 0.521 | 0.390 | 0.058 | 0.054 |
| C5 off- | | | | | | | | | | |
| target 2 | | | | | | | | | | |
| EMX1, | 0.024 | 0.024 | 0.024 | 0.024 | 0.285 | 0.560 | 0.954 | 0.420 | 0.103 | 0.306 |
| C6 off- | | | | | | | | | | |
| target 2 | | | | | | | | | | |
| EMX1, | 0.022 | 0.019 | 0.019 | 0.019 | 0.297 | 0.297 | 0.300 | >0.99999 | 0.882 | 0.815 |
| C5 off- | | | | | | | | | | |
| target 3 | | | | | | | | | | |
| EMX1, | 0.017 | 0.015 | 0.015 | 0.015 | 0.296 | 0.296 | 0.328 | >0.99999 | 0.051 | 0.025 |
| C6 off- | | | | | | | | | | |
| target 3 | | | | | | | | | | |
| FANCF, | 0.031 | 0.031 | 0.031 | 0.031 | 0.314 | 0.530 | 0.333 | 0.337 | 0.349 | 0.618 |
| C5 off- | | | | | | | | | | |
| target 1 | | | | | | | | | | |
| FANCF, | 0.016 | 0.016 | 0.016 | 0.016 | 0.347 | 0.786 | 0.930 | 0.338 | 0.344 | 0.678 |
| C6 off- | | | | | | | | | | |
| target 1 | | | | | | | | | | |
| FANCF, | 0.028 | 0.028 | 0.028 | 0.027 | 0.374 | 0.039 | 0.106 | 0.353 | 0.346 | 0.639 |
| C7 off- | | | | | | | | | | |
| target 1 | | | | | | | | | | |
| FANCF, | 0.014 | 0.014 | 0.014 | 0.014 | 0.341 | 0.932 | 0.685 | 0.343 | 0.318 | 0.605 |
| C8 off- | | | | | | | | | | |
| target 1 | | | | | | | | | | |
| FANCF, | 0.007 | 0.007 | 0.007 | 0.007 | 0.374 | 0.001 | 0.000 | >0.99999 | 0.475 | 0.016 |
| C11 off- | | | | | | | | | | |
| target 1 | | | | | | | | | | |
| FANCF, | 0.099 | 0.099 | 0.032 | 0.036 | 0.599 | 0.475 | 0.912 | 0.914 | 0.393 | 0.060 |
| C6 off- | | | | | | | | | | |
| target 2 | | | | | | | | | | |
| FANCF, | 0.080 | 0.080 | 0.027 | 0.030 | 0.898 | 0.638 | 0.819 | 0.539 | 0.859 | 0.530 |
| C7 off- | | | | | | | | | | |
| target 2 | | | | | | | | | | |
| FANCF, | 0.123 | 0.123 | 0.045 | 0.050 | 0.789 | 0.538 | 0.960 | 0.047 | 0.539 | 0.252 |
| C8 off- | | | | | | | | | | |
| target 2 | | | | | | | | | | |
| FANCF, | 0.093 | 0.093 | 0.029 | 0.033 | 0.630 | 0.509 | 0.847 | 0.768 | 0.670 | 0.482 |
| C10 off- | | | | | | | | | | |
| target 2 | | | | | | | | | | |
| FANCF, | 0.264 | 0.264 | 0.127 | 0.107 | 0.599 | 0.658 | 0.326 | >0.99999 | 0.047 | 0.345 |
| C11 off- | | | | | | | | | | |
| target 2 | | | | | | | | | | |
| FANCF, | 0.872 | 0.872 | 0.492 | 0.108 | 0.239 | 0.493 | 0.129 | 0.469 | 0.584 | 0.252 |
| C6 off- | | | | | | | | | | |
| target 3 | | | | | | | | | | |
| FANCF, | >0.99999 | >0.99999 | 0.859 | 0.016 | 0.537 | 0.866 | 0.116 | 0.572 | 0.272 | 0.595 |
| C7 off- | | | | | | | | | | |
| target 3 | | | | | | | | | | |
| FANCF, | 0.886 | 0.886 | 0.246 | 0.757 | >0.99999 | 0.001 | 0.648 | 0.495 | 0.780 | 0.650 |
| C8 off- | | | | | | | | | | |
| target 3 | | | | | | | | | | |
| FANCF, | 0.566 | 0.566 | 0.284 | 0.202 | 0.053 | 0.387 | 0.260 | 0.453 | 0.913 | 0.541 |
| C10 off- | | | | | | | | | | |
| target 3 | | | | | | | | | | |
| FANCF, | 0.422 | 0.422 | 0.145 | 0.145 | 0.495 | 0.230 | 0.230 | 0.658 | 0.658 | >0.99999 |
| C11 off- | | | | | | | | | | |
| target 3 | | | | | | | | | | |
| HEK293 | >0.99999 | 0.910 | 0.412 | 0.326 | 0.910 | 0.412 | 0.326 | 0.293 | 0.223 | 0.480 |
| site 3, | | | | | | | | | | |
| C3 off- | | | | | | | | | | |
| target 1 | | | | | | | | | | |
| HEK293 | >0.99999 | 0.994 | 0.437 | 0.391 | 0.994 | 0.437 | 0.391 | 0.495 | 0.451 | 0.614 |
| site 3, | | | | | | | | | | |
| C4 off- | | | | | | | | | | |
| target 1 | | | | | | | | | | |
| HEK293 | >0.99999 | 0.616 | 0.814 | 0.337 | 0.616 | 0.814 | 0.337 | 0.459 | 0.116 | 0.481 |
| site 3, | | | | | | | | | | |
| C5 off- | | | | | | | | | | |
| target 1 | | | | | | | | | | |
| HEK293 | 0.285 | 0.473 | 0.100 | 0.473 | 0.141 | 0.735 | 0.141 | 0.038 | >0.99999 | 0.038 |
| site 3, | | | | | | | | | | |
| C3 off- | | | | | | | | | | |
| target 2 | | | | | | | | | | |
| HEK293 | 0.375 | 0.294 | 0.177 | 0.294 | 0.687 | 0.428 | 0.687 | 0.064 | >0.99999 | 0.064 |
| site 3, | | | | | | | | | | |
| C5 off- | | | | | | | | | | |
| target 2 | | | | | | | | | | |
| HEK293 | 0.053 | 0.624 | 0.374 | 0.624 | 0.554 | 0.154 | 0.554 | 0.872 | >0.99999 | 0.872 |
| site 3, | | | | | | | | | | |
| C9 off- | | | | | | | | | | |
| target 2 | | | | | | | | | | |
| HEK293 | 0.067 | 0.116 | 0.768 | 0.435 | 0.519 | 0.230 | 0.561 | 0.349 | 0.768 | 0.643 |
| site 3, | | | | | | | | | | |
| C3 off- | | | | | | | | | | |
| target 3 | | | | | | | | | | |
| HEK293 | 0.011 | 0.011 | 0.011 | 0.011 | 0.016 | 0.643 | 0.435 | 0.184 | 0.025 | 0.346 |
| site 3, | | | | | | | | | | |
| C5 off- | | | | | | | | | | |
| target 3 | | | | | | | | | | |
| HEK293 | >0.99999 | 0.374 | 0.652 | 0.811 | 0.132 | 0.539 | 0.776 | 0.609 | 0.643 | 0.893 |
| site 3, | | | | | | | | | | |
| C9 off- | | | | | | | | | | |
| target 3 | | | | | | | | | | |
| VEGFA | 0.101 | 0.015 | 0.014 | 0.012 | 0.041 | 0.032 | 0.025 | 0.117 | 0.012 | 0.001 |
| site 2, | | | | | | | | | | |
| C4 off- | | | | | | | | | | |
| target 1 | | | | | | | | | | |
| VEGFA | 0.060 | 0.013 | 0.012 | 0.010 | 0.078 | 0.062 | 0.044 | 0.201 | 0.009 | 0.012 |
| site 2, | | | | | | | | | | |
| C5 off- | | | | | | | | | | |
| target 1 | | | | | | | | | | |
| VEGFA | 0.019 | 0.005 | 0.005 | 0.004 | 0.080 | 0.062 | 0.045 | 0.087 | 0.002 | 0.012 |
| site 2, | | | | | | | | | | |
| C6 off- | | | | | | | | | | |
| target 1 | | | | | | | | | | |
| VEGFA | 0.017 | 0.004 | 0.004 | 0.003 | 0.080 | 0.060 | 0.037 | 0.076 | 0.001 | 0.002 |
| site 2, | | | | | | | | | | |
| C7 off- | | | | | | | | | | |
| target 1 | | | | | | | | | | |
| VEGFA | 0.230 | 0.088 | 0.037 | 0.011 | 0.667 | 0.256 | 0.051 | 0.134 | 0.004 | 0.007 |
| site 2, | | | | | | | | | | |
| C9 off- | | | | | | | | | | |
| target 1 | | | | | | | | | | |
| VEGFA | 0.535 | 0.136 | 0.103 | 0.035 | 0.283 | 0.211 | 0.050 | 0.717 | 0.028 | 0.010 |
| site 2, | | | | | | | | | | |
| C10 off- | | | | | | | | | | |
| target 1 | | | | | | | | | | |
| VEGFA | 0.038 | 0.004 | 0.003 | 0.003 | 0.087 | 0.051 | 0.048 | 0.063 | 0.048 | 0.134 |
| site 2, | | | | | | | | | | |
| C4 off- | | | | | | | | | | |
| target 2 | | | | | | | | | | |
| VEGFA | 0.033 | 0.004 | 0.004 | 0.004 | 0.078 | 0.061 | 0.059 | 0.028 | 0.020 | 0.248 |
| site 2, | | | | | | | | | | |
| C5 off- | | | | | | | | | | |
| target 2 | | | | | | | | | | |
| VEGFA | 0.026 | 0.005 | 0.005 | 0.004 | 0.051 | 0.038 | 0.038 | 0.043 | 0.038 | 0.783 |
| site 2, | | | | | | | | | | |
| C6 off- | | | | | | | | | | |
| target 2 | | | | | | | | | | |
| VEGFA | 0.053 | 0.006 | 0.005 | 0.005 | 0.072 | 0.056 | 0.055 | 0.078 | 0.064 | 0.704 |
| site 2, | | | | | | | | | | |
| C7 off- | | | | | | | | | | |
| target 2 | | | | | | | | | | |
| VEGFA | 0.071 | 0.006 | 0.006 | 0.006 | 0.079 | 0.065 | 0.065 | 0.118 | 0.107 | 0.703 |
| site 2, | | | | | | | | | | |
| C8 off- | | | | | | | | | | |
| target 2 | | | | | | | | | | |
| VEGFA | 0.193 | 0.008 | 0.007 | 0.006 | 0.103 | 0.090 | 0.084 | 0.068 | 0.007 | 0.217 |
| site 2, | | | | | | | | | | |
| C9 off- | | | | | | | | | | |
| target 2 | | | | | | | | | | |
| VEGFA | 0.063 | 0.003 | 0.003 | 0.002 | 0.116 | 0.107 | 0.090 | 0.545 | 0.016 | 0.346 |
| site 2, | | | | | | | | | | |
| C10 off- | | | | | | | | | | |
| target 2 | | | | | | | | | | |
| VEGFA | 0.005 | 0.003 | 0.003 | 0.003 | 0.091 | 0.031 | 0.030 | 0.116 | 0.107 | 0.158 |
| site 2, | | | | | | | | | | |
| C4 off- | | | | | | | | | | |
| target 3 | | | | | | | | | | |
| VEGFA | 0.011 | 0.007 | 0.005 | 0.005 | 0.211 | 0.048 | 0.042 | 0.220 | 0.177 | 0.001 |
| site 2, | | | | | | | | | | |
| C5 off- | | | | | | | | | | |
| target 3 | | | | | | | | | | |
| VEGFA | 0.020 | 0.005 | 0.003 | 0.003 | 0.142 | 0.038 | 0.033 | 0.193 | 0.149 | 0.015 |
| site 2, | | | | | | | | | | |
| C6 off- | | | | | | | | | | |
| target 3 | | | | | | | | | | |
| VEGFA | 0.045 | 0.006 | 0.003 | 0.003 | 0.101 | 0.035 | 0.030 | 0.093 | 0.060 | 0.083 |
| site 2, | | | | | | | | | | |
| C7 off- | | | | | | | | | | |
| target 3 | | | | | | | | | | |
| VEGFA | 0.069 | 0.007 | 0.005 | 0.005 | 0.087 | 0.045 | 0.039 | 0.120 | 0.067 | 0.041 |
| site 2, | | | | | | | | | | |
| C8 off- | | | | | | | | | | |
| target 3 | | | | | | | | | | |
| VEGFA | 0.093 | 0.006 | 0.005 | 0.005 | 0.041 | 0.032 | 0.028 | 0.396 | 0.195 | 0.005 |
| site 2, | | | | | | | | | | |
| C9 off- | | | | | | | | | | |
| target 3 | | | | | | | | | | |
| VEGFA | 0.342 | 0.011 | 0.008 | 0.007 | 0.109 | 0.081 | 0.069 | 0.273 | 0.098 | 0.036 |
| site 2, | | | | | | | | | | |
| C10 off- | | | | | | | | | | |
| target 3 | | | | | | | | | | |
| VEGFA | 0.001 | 0.001 | 0.001 | 0.001 | 0.374 | 0.374 | 0.230 | 0.271 | 0.358 | 0.633 |
| site 2, | | | | | | | | | | |
| C3 off- | | | | | | | | | | |
| target 4 | | | | | | | | | | |
| VEGFA | 0.007 | 0.006 | 0.006 | 0.006 | 0.137 | 0.137 | 0.137 | 0.592 | 0.862 | 0.690 |
| site 2, | | | | | | | | | | |
| C4 off- | | | | | | | | | | |
| target 4 | | | | | | | | | | |
| VEGFA | 0.007 | 0.007 | 0.007 | 0.007 | 0.026 | 0.017 | 0.018 | 0.461 | 0.655 | 0.279 |
| site 2, | | | | | | | | | | |
| C5 off- | | | | | | | | | | |
| target 4 | | | | | | | | | | |
| VEGFA | 0.005 | 0.004 | 0.004 | 0.004 | 0.021 | 0.018 | 0.018 | 0.398 | 0.546 | 0.149 |
| site 2, | | | | | | | | | | |
| C6 off- | | | | | | | | | | |
| target 4 | | | | | | | | | | |
| VEGFA | 0.007 | 0.006 | 0.006 | 0.006 | 0.051 | 0.048 | 0.050 | 0.373 | 0.720 | 0.029 |
| site 2, | | | | | | | | | | |
| C7 off- | | | | | | | | | | |
| target 4 | | | | | | | | | | |
| VEGFA | 0.007 | 0.006 | 0.006 | 0.006 | 0.092 | 0.092 | 0.092 | 0.325 | 0.014 | 0.275 |
| site 2, | | | | | | | | | | |
| C8 off- | | | | | | | | | | |
| target 4 | | | | | | | | | | |
| VEGFA | 0.016 | 0.007 | 0.007 | 0.007 | 0.150 | 0.150 | 0.150 | 0.502 | 1.000 | 0.615 |
| site 2, | | | | | | | | | | |
| C9 off- | | | | | | | | | | |
| target 4 | | | | | | | | | | |
| VEGFA | 0.213 | 0.009 | 0.009 | 0.009 | 0.261 | 0.261 | 0.261 | 0.653 | 0.575 | 0.660 |
| site 2, | | | | | | | | | | |
| C10 off- | | | | | | | | | | |
| target 4 | | | | | | | | | | |

[0722] In addition to considering the differences between absolute editing at off-target loci, the on-target:off-target editing specificity ratio was also calculated by dividing the observed on-target efficiency by the off-target efficiency (FIGS. 129A-129B). This metric takes into account any reduction in on-target editing associated with installation of the HF-mutations, and is useful for applications sensitive to both the efficiency and specificity of base editing. Off-target editing by HF-BE3 was below the detection limit of high-throughput sequencing for several off-target loci. For these cases, a conservative off-target editing efficiency equal to the upper limit of detection was assumed (0.025% C→T conversion; see Methods). Based on this analysis, the average improvement in specificity ratio upon installation of the HF mutations across all 34 target cytosines examined herein was 19-fold, when plasmid delivery of the two constructs was performed. These results collectively establish that for non-repetitive sites (FIG. 129A) as well as a highly repetitive site (FIG. 129B), HF-BE3 results in substantially enhanced base editing specificity with only a modest reduction in on-target editing efficiency compared to BE3.

### RNP Delivery of BE3 Enables DNA-Free Base Editing

[0723] Next, the ability of BE3 in DNA-free, RNP form to mediate base editing when directly delivered into cultured human cells was studied. It has recently been established that cationic lipid reagents can potently deliver negatively charged proteins or protein:nucleic acid complexes into mammalian cells including ribonucleoprotein (RNP) complexes and that RNP delivery can substantially reduce off-target genome editing²⁷⁻²⁹

[0724] The commercially available cationic lipid Lipofectamine 2000 was combined with either purified BE3 protein or HF-BE3 protein after pre-complexation with a guide RNA targeting the EMX1, HEK293 site 3, FANCF, or VEGFA site 2 locus and the resulting lipid:RNP complexes were incubated with HEK293T cells. After 72 h, genomic DNA was harvested and on-target and off-target base editing was analyzed by high-throughput DNA sequencing. As with all Cas9-based technologies, substantial variations were observed in editing efficiency at different genomic loci (FIGS. 127 and 130). To display trends associated with in on-target editing efficiency between different treatments, mean on-target base editing efficiencies were calculated at the four tested loci (FIG. 128A). Protein delivery of BE3 (200 nM) lead to on-target editing efficiencies comparable to those observed with plasmid transfection (26±4% vs. 29±5% respectively; mean±s.e.m. for n=3 biological replicates; FIG. 128A).

[0725] In contrast, protein delivery of HF-BE3 reduced on-target editing compared to protein delivery of BE3 at the four genomic loci studied (average editing efficiency of 13±3% vs. 26±4%, respectively; mean±s.e.m. for n=3 biological replicates; FIG. 128A). Since HF-BE3 and BE3 have comparable editing efficiencies in a test tube (FIG. 125B) and editing is only slightly reduced when HF-BE3 is expressed from plasmids in HEK293T cells (FIG. 127A-D), it is tempting to speculate that the decreased efficiency of editing from HF-BE3 protein delivery may be a result of decreased HF-BE3 stability in mammalian cells. Lower stability could be offset by continual expression from a plasmid, but not following one-time protein delivery. This observation is consistent with a recent report of reduced on-target indel formation with purified HF-Cas9 compared to purified Cas9 when nucleofected into CD34⁺ hematopoietic stem and progenitor cells³⁰. While this work was in review, Kim et al demonstrated RNP delivery of BE3 into mouse embryos using electroporation³¹. To the best of the inventors' knowledge, the present approach is the first DNA-free technique capable of generating precise changes to individual nucleotides in mammalian cells without electroporation, which has limited in vivo therapeutic relevance.

### RNP Delivery of Base Editors Greatly Enhances DNA Specificity

[0726] Importantly, while RNP delivery of BE3 and HF-BE3 led to substantial on-target base editing, no instances of measurable base editing (<0.025%) were observed at any of the nine tested off-target loci associated with EMX1, FANCF and HEK293 site 3, (FIGS. 130A-130C). In contrast, plasmid delivery of BE3 lead to an average of 1.1±0.3% (mean±s.d. for n=3 biological replicates) off-editing across all sequenced cytosines within the base editing activity window, and detectable off-target editing at 11 of 16 off-target cytosines located at these nine off-target loci (FIGS. 127A-127D). At off-target loci of the three non-repetitive loci tested, BE3 protein delivery lead to a 26-fold higher average specificity ratio than that of plasmid delivery (FIG. 127A). These results reveal that RNP delivery of base editors dramatically increases the DNA specificity of base editing.

[0727] Protein delivery of either BE3 or HF-BE3 also resulted in greatly improved base editing specificity at the highly promiscuous VEGFA site 2 locus compared to plasmid delivery of either BE3 or HF-BE3 (compare FIGS. 127 and 130; see Table 16). Absolute frequencies of base editing at the off-target loci associated with this site were reduced upon protein delivery at least 10-fold for both BE3 (plasmid delivery: 15±4% off-target editing; protein delivery: 1.3±0.4% off-target editing; all values in this paragraph represent mean±s.d. for n=3 biological replicates) and HF-BE3 (plasmid delivery: 5±2% off-target editing; protein delivery: 0.5±0.1% off-target editing). Across all four studied loci, base editing specificity ratios for on-target:off-target editing increased an average of 66-fold for protein delivery of BE3 compared with plasmid delivery of BE3 (FIG. 129). Collectively, these results reveal that for both repetitive and non-repetitive target sites, RNP versus DNA delivery is a stronger determinant of base editing specificity than the presence or absence of the high-fidelity Cas9 mutations.

[0728] Neither introduction of the HF mutations nor delivery method substantially altered the low indel rates associated with base editing. Indel frequencies at all on-target loci across all treatment conditions in this study remained low (typically ≤5%; FIG. 131A), and the editing:indel ratio remained higher in all cases tested (typically ≥10-fold; FIG. 131B) than in previous studies using optimized HDR protocols^{30,32,33}. For non-repetitive sgRNAs, very few indels were observed at off-target loci (FIG. 131C), although it is noted that plasmid delivery of BE3 generated up to 5% indels for off-target loci associated with VEGFA site 2 (FIG. 131C).

[0729] Taken together, these results establish that protein delivery of base editors maintains on-target base editing efficiency and greatly enhances editing specificity relative to delivery of plasmid DNA.

### RNP Delivery Decouples On- and Off-Target Editing

[0730] Given the striking enhancement of base editing specificity associated with protein delivery of BE3, it was investigated if this improvement was a result of a reduction in the total quantity of active genome editing agent delivered into the cell. Using the sgRNA targeting EMX1, a dose response study for plasmid (FIG. 128B) and protein delivery (FIG. 128C) was performed. To maximize transfection efficiency between treatment conditions, the volume of Lipofectamine 2000 was 1.5 μL for all tests, and the base editor protein:sgRNA molar ratio was maintained at 1:1.1 for protein delivery. For plasmid delivery, a mass ratio of sgRNA plasmid:BE3 plasmid of 1:3 (molar ratio ˜1:1) and 1.5 μL of Lipofectamine 2000 were used. Off-target base editing was observed under all conditions tested for plasmid delivery (FIG. 128B), but virtually no off-target editing under all protein delivery conditions tested (FIG. 128C).

[0731] Linear regression analysis was performed to assess the relationship between on- and off-target editing for plasmid and protein delivery. For plasmid delivery, off-target editing was closely associated with on-target editing rates (R²=0.95, p=0.0012 for non-zero slope, F-test), whereas there was no significant association between off-target and on-target editing using protein delivery (R²=0.078, p=0.59 for non-zero slope, F-test).

[0732] These data indicate that protein delivery of base editors offers an inherent specificity advantage that is independent of dosage. Together with the previous observations^{29,34}, these findings support a model in which the higher DNA specificity of base editing from protein delivery compared to DNA delivery arises from the ability of protein delivery to avoid extended exposure of the genome to base editors, thereby minimizing the opportunity of base editors to process off-target loci after on-target loci have already been modified.

### DNA Free Base Editing in Zebrafish and Mice

[0733] The above observations suggested the promise of protein delivery of BE3 to maintain on-target base editing while eliminating detectable off-target base editing. It was therefore tested whether protein delivery of BE3 could be used to generate specific point mutations in zebrafish by injecting BE3:sgRNA complexes targeting the tyrosinase locus into fertilized zebrafish embryos. Genomic DNA was harvested from the resultant zebrafish larvae 4 days post-injection and measured base editing and indel frequencies by high-throughput sequencing (FIG. 132A). Two of the three BE3:sgRNA complexes tested induced substantial point mutations in vivo (TYR1: C₃→T₃ 5.3±1.8%, TYR2: C₄→T₄ 4.3±2.1%; mean±s.d. of n=3 injected embryos; FIG. 132A). Sequences of zebrafish loci are listed in Table 17.

TABLE 17
Number of HTS reads that align to the reference sequence
and pass the quality filters described in Materials and Methods.

| | Replicate | | | |
|---|---|---|---|---|
| Sample Description | 1 | 2 | 3 | Amplicon |

HEK cell samples

| | | | | |
|---|---|---|---|---|
| Protein, BE3 | 237256 | 295609 | 159391 | VEGFA On Target |
| Protein, HF-BE3 | 383480 | 389874 | 383467 | VEGFA On Target |
| Plasmid, BE3 | 315213 | 280891 | 335668 | VEGFA On Target |
| Plasmid, HF-BE3 | 196323 | 251965 | 369201 | VEGFA On Target |
| Control | 390748 | 395523 | 353614 | VEGFA On Target |
| Protein, BE3 | 19280 | 26472 | 24799 | FANCF Off Target |
| | | | | Site # 1 |
| Protein, HF-BE3 | 36383 | 30007 | 39193 | FANCF Off Target |
| | | | | Site # 1 |
| Plasmid, BE3 | 35580 | 29557 | 22243 | FANCF Off Target |
| | | | | Site # 1 |
| Plasmid, HF-BE3 | 40371 | 27187 | 28248 | FANCF Off Target |
| | | | | Site # 1 |
| Control | 35106 | 37274 | 34939 | FANCF Off Target |
| | | | | Site # 1 |
| Protein, BE3 | 82978 | 124689 | 83840 | VEGFA Off Target |
| | | | | Site # 1 |
| Protein, HF-BE3 | 142404 | 140482 | 142220 | VEGFA Off Target |
| | | | | Site # 1 |
| Plasmid, BE3 | 112027 | 117071 | 100894 | VEGFA Off Target |
| | | | | Site # 1 |
| Plasmid, HF-BE3 | 114187 | 98876 | 122553 | VEGFA Off Target |
| | | | | Site # 1 |
| Control | 76854 | 90547 | 89271 | VEGFA Off Target |
| | | | | Site # 1 |
| Protein, BE3 | 14514 | 25515 | 19325 | VEGFA Off Target |
| | | | | Site # 2 |
| Protein, HF-BE3 | 24678 | 24363 | 25312 | VEGFA Off Target |
| | | | | Site # 2 |
| Plasmid, BE3 | 16945 | 19918 | 10225 | VEGFA Off Target |
| | | | | Site # 2 |
| Plasmid, HF-BE3 | 12200 | 14769 | 17797 | VEGFA Off Target |
| | | | | Site # 2 |
| Control | 8739 | 13648 | 7818 | VEGFA Off Target |
| | | | | Site # 2 |
| Protein, BE3 | 17924 | 111693 | 173909 | VEGFA Off Target |
| | | | | Site # 3 |
| Protein, HF-BE3 | 243899 | 300503 | 276139 | VEGFA Off Target |
| | | | | Site # 3 |
| Plasmid, BE3 | 208476 | 291370 | 155430 | VEGFA Off Target |
| | | | | Site # 3 |
| Plasmid, HF-BE3 | 117174 | 154033 | 199152 | VEGFA Off Target |
| | | | | Site # 3 |
| Control | 119263 | 170436 | 121686 | VEGFA Off Target |
| | | | | Site # 3 |
| Protein, BE3 | 237799 | 262947 | 185371 | VEGFA Off Target |
| | | | | Site # 4 |
| Protein, HF-BE3 | 313253 | 233699 | 244922 | VEGFA Off Target |
| | | | | Site # 4 |
| Plasmid, BE3 | 243094 | 230316 | 234421 | VEGFA Off Target |
| | | | | Site # 4 |
| Plasmid, HF-BE3 | 170958 | 160091 | 140693 | VEGFA Off Target |
| | | | | Site # 4 |
| Control | 158691 | 148720 | 137270 | VEGFA Off Target |
| | | | | Site # 4 |
| Protein, BE3 | 28684 | 28237 | 43315 | HEK3 On Target |
| Protein, HF-BE3 | 49300 | 42576 | 57690 | HEK3 On Target |
| Plasmid, BE3 | 55008 | 55813 | 54310 | HEK3 On Target |
| Plasmid, HF-BE3 | 55199 | 11384 | 7659 | HEK3 On Target |
| Control | 63741 | 42878 | 48524 | HEK3 On Target |
| Protein, BE3 | 104822 | 181792 | 161090 | HEK3 Off Target Site |
| | | | | # 1 |
| Protein, HF-BE3 | 204580 | 175561 | 177303 | HEK3 Off Target Site |
| | | | | # 1 |
| Plasmid, BE3 | 178584 | 152264 | 206863 | HEK3 Off Target Site |
| | | | | # 1 |
| Plasmid, HF-BE3 | 191297 | 138425 | 160789 | HEK3 Off Target Site |
| | | | | # 1 |
| Control | 190303 | 190061 | 190516 | HEK3 Off Target Site |
| | | | | # 1 |
| Protein, BE3 | 146089 | 95113 | 135015 | HEK3 Off Target Site |
| | | | | # 2 |
| Protein, HF-BE3 | 155947 | 136541 | 157991 | HEK3 Off Target Site |
| | | | | # 2 |
| Plasmid, BE3 | 150036 | 128438 | 158905 | HEK3 Off Target Site |
| | | | | # 2 |
| Plasmid, HF-BE3 | 371077 | 123642 | 142562 | HEK3 Off Target Site |
| | | | | # 2 |
| Control | 130322 | 134545 | 141833 | HEK3 Off Target Site |
| | | | | # 2 |
| Protein, BE3 | 145058 | 175338 | 161837 | HEK3 Off Target Site |
| | | | | # 3 |
| Protein, HF-BE3 | 212337 | 178993 | 179887 | HEK3 Off Target Site |
| | | | | # 3 |
| Plasmid, BE3 | 186452 | 166500 | 80441 | HEK3 Off Target Site |
| | | | | # 3 |
| Plasmid, HF-BE3 | 163732 | 118453 | 134719 | HEK3 Off Target Site |
| | | | | # 3 |
| Control | 131461 | 134470 | 155608 | HEK3 Off Target Site |
| | | | | # 3 |
| Protein, BE3 | 41986 | 61678 | 67890 | FANCF On Target |
| Protein, HF-BE3 | 41057 | 55850 | 86411 | FANCF On Target |
| Plasmid, BE3 | 39114 | 48575 | 70074 | FANCF On Target |
| Plasmid, HF-BE3 | 41617 | 55638 | 75718 | FANCF On Target |
| Control | 68852 | 59422 | 81265 | FANCF On Target |
| Protein, BE3 | 113462 | 80529 | 191344 | FANCF Off Target |
| | | | | Site # 1 |
| Protein, HF-BE3 | 202662 | 233981 | 203024 | FANCF Off Target |
| | | | | Site # 1 |
| Plasmid, BE3 | 208912 | 202044 | 107234 | FANCF Off Target |
| | | | | Site # 1 |
| Plasmid, HF-BE3 | 86494 | 113989 | 86807 | FANCF Off Target |
| | | | | Site # 1 |
| Control | 92255 | 72386 | 56661 | FANCF Off Target |
| | | | | Site # 1 |
| Protein, BE3 | 96271 | 117442 | 84374 | FANCF Off Target |
| | | | | Site # 2 |
| Protein, HF-BE3 | 105624 | 102312 | 105343 | FANCF Off Target |
| | | | | Site # 2 |
| Plasmid, BE3 | 101002 | 98747 | 70052 | FANCF Off Target |
| | | | | Site # 2 |
| Plasmid, HF-BE3 | 308966 | 69787 | 83184 | FANCF Off Target |
| | | | | Site # 2 |
| Control | 99986 | 100344 | 100659 | FANCF Off Target |
| | | | | Site # 2 |
| Protein, BE3 | 25524 | 182451 | 65388 | FANCF Off Target |
| | | | | Site # 3 |
| Protein, HF-BE3 | 71858 | 75553 | 71785 | FANCF Off Target |
| | | | | Site # 3 |
| Plasmid, BE3 | 60980 | 57360 | 78169 | FANCF Off Target |
| | | | | Site # 3 |
| Plasmid, HF-BE3 | 68316 | 34659 | 85718 | FANCF Off Target |
| | | | | Site # 3 |
| Control | 49685 | 57388 | 60418 | FANCF Off Target |
| | | | | Site # 3 |
| Protein, BE3 | 46981 | 90793 | 79439 | EMX1 On Target |
| Protein, HF-BE3 | 58629 | 71186 | 61575 | EMX1 On Target |
| Plasmid, BE3 | 70817 | 82736 | 75706 | EMX1 On Target |
| Plasmid, HF-BE3 | 77038 | 71123 | 78511 | EMX1 On Target |
| Control | 62183 | 48574 | 68439 | EMX1 On Target |
| Protein, BE3 | 165905 | 257565 | 142888 | EMX 1 Off Target Site |
| | | | | # 1 |
| Protein, HF-BE3 | 148339 | 151300 | 130712 | EMX 1 Off Target Site |
| | | | | # 1 |
| Plasmid, BE3 | 101950 | 103226 | 203004 | EMX 1 Off Target Site |
| | | | | # 1 |
| Plasmid, HF-BE3 | 167969 | 175193 | 97010 | EMX 1 Off Target Site |
| | | | | # 1 |
| Control | 101476 | 150435 | 102327 | EMX 1 Off Target Site |
| | | | | # 1 |
| Protein, BE3 | 136738 | 213438 | 118711 | EMX 1 Off Target Site |
| | | | | # 2 |
| Protein, HF-BE3 | 123413 | 126114 | 109375 | EMX 1 Off Target Site |
| | | | | # 2 |
| Plasmid, BE3 | 85576 | 86600 | 169592 | EMX 1 Off Target Site |
| | | | | # 2 |
| Plasmid, HF-BE3 | 140317 | 145738 | 137050 | EMX 1 Off Target Site |
| | | | | # 2 |
| Control | 84818 | 125139 | 85454 | EMX 1 Off Target Site |
| | | | | # 2 |
| Protein, BE3 | 11940 | 36593 | 24946 | EMX1 Off Target Site |
| | | | | # 3 |
| Protein, HF-BE3 | 26762 | 31566 | 36377 | EMX1 Off Target Site |
| | | | | # 3 |
| Plasmid, BE3 | 32420 | 21547 | 14659 | EMX1 Off Target Site |
| | | | | # 3 |
| Plasmid, HF-BE3 | 31427 | 16592 | 17385 | EMX1 Off Target Site |
| | | | | # 3 |
| Control | 17385 | 28128 | 32717 | EMX1 Off Target Site |
| | | | | # 3 |

Murine Samples from NIH 3T3 cell treatment

| | | | | |
|---|---|---|---|---|
| Plasmid, BE3 | 16641 | 102216 | 46361 | On Target VEGFA |
| | | | | (Mus) |
| Plasmid, HF-BE3 | 89330 | 126545 | 100993 | On Target VEGFA |
| | | | | (Mus) |
| Protein, BE3 | 88998 | 81697 | 51124 | On Target VEGFA |
| | | | | (Mus) |
| Protein, HF-BE3 | 128218 | 29193 | 131515 | On Target VEGFA |
| | | | | (Mus) |
| Control | 18767 | 38866 | 58985 | On Target VEGFA |
| | | | | (Mus) |
| Plasmid, BE3 | 174782 | 167504 | 182565 | CFD Off Target 1 |
| Plasmid, HF-BE3 | 167120 | 182520 | 192389 | CFD Off Target 1 |
| Protein, BE3 | 230569 | 212605 | 138144 | CFD Off Target 1 |
| Protein, HF-BE3 | 228668 | 211457 | 183370 | CFD Off Target 1 |
| Control | 171738 | 191117 | 20879 | CFD Off Target 1 |
| Plasmid, BE3 | 206475 | 227332 | 206089 | CFD Off Target 2 |
| Plasmid, HF-BE3 | 213809 | 203028 | 199078 | CFD Off Target 2 |
| Protein, BE3 | 215995 | 275754 | 249969 | CFD Off Target 2 |
| Protein, HF-BE3 | 250918 | 272063 | 241059 | CFD Off Target 2 |
| Control | 193760 | 175959 | 246963 | CFD Off Target 2 |
| Plasmid, BE3 | 60388 | 126278 | 7328 | CFD Off Target 3 |
| Plasmid, HF-BE3 | 89045 | 128508 | 5178 | CFD Off Target 3 |
| Protein, BE3 | 167195 | 330046 | 11163 | CFD Off Target 3 |
| Protein, HF-BE3 | 82120 | 309352 | 10393 | CFD Off Target 3 |
| Control | 83204 | 176939 | 5661 | CFD Off Target 3 |
| Plasmid, BE3 | 192846 | 113709 | 171078 | CFD Off Target 4 |
| Plasmid, HF-BE3 | 205601 | 151434 | 188943 | CFD Off Target 4 |
| Protein, BE3 | 218194 | 181993 | 208398 | CFD Off Target 4 |
| Protein, HF-BE3 | 211966 | 148976 | 186838 | CFD Off Target 4 |
| Control | 183933 | 130318 | 197476 | CFD Off Target 4 |

Mouse Cochlea Samples

| | | | | |
|---|---|---|---|---|
| Stria vascularies | 37889 | 205706 | 62091 | On Target (VEGFA) |
| Organ of Corti | 148447 | 175004 | 29075 | On Target (VEGFA) |
| Modiolus | 182806 | 181382 | 61269 | On Target (VEGFA) |
| Uninjected control | 228222 | 241979 | 272759 | On Target (VEGFA) |
| Stria vascularies | 44457 | 244487 | 244646 | CFD Off Target 1 |
| Organ of Corti | 136335 | 118318 | 34747 | CFD Off Target 1 |
| Modiolus | 67176 | 209543 | 68699 | CFD Off Target 1 |
| Uninjected control | 343100 | 342717 | 379015 | CFD Off Target 1 |
| Stria vascularies | 72962 | 319883 | 265793 | CFD Off Target 2 |
| Organ of Corti | 198456 | 131430 | 60530 | CFD Off Target 2 |
| Modiolus | 92014 | 251509 | 81413 | CFD Off Target 2 |
| Uninjected control | 399138 | 345965 | 483920 | CFD Off Target 2 |
| Stria vascularies | 8325 | 80322 | 142556 | CFD Off Target 3 |
| Organ of Corti | 81014 | 45976 | 1810 | CFD Off Target 3 |
| Modiolus | 9928 | 75555 | 11341 | CFD Off Target 3 |
| Uninjected control | 399138 | 345965 | 483920 | CFD Off Target 3 |
| Stria vascularies | 232194 | 397770 | 554054 | CFD Off Target 4 |
| Organ of Corti | 313472 | 285302 | 176872 | CFD Off Target 4 |
| Modiolus | 230105 | 371399 | 258142 | CFD Off Target 4 |
| Uninjected control | 524503 | 637946 | 624709 | CFD Off Target 4 |

Zebrafish samples

| | 1 | 2 | 3 | Amplicon |
|---|---|---|---|---|
| Treated zebrafish | 72355 | 49498 | 81061 | TYR 1 |
| Scrambled sgRNA | 107919 | 98502 | 92429 | TYR 1 |
| Treated zebrafish | 51434 | 48014 | 41547 | TYR 2 |
| Scrambled sgRNA | 61466 | 62374 | 66765 | TYR 2 |
| Treated zebrafish | 6487 | 57247 | 75883 | TYR 3 |
| Scrambled sgRNA | 64596 | 71234 | 75624 | TYR 3 |

Mouse Cochlea Samples - treated with unrealated sgRNA

| Sample | | | |
|---|---|---|---|
| Stria | Cortii | Modiolus | Amplicon |
| 537459 | 249767 | 389274 | On Target (VEGFA) |

[0734] Finally, these developments were applied to achieve DNA-free, high-specificity base editing in mice. To maximize the likelihood of observing on- and off-target base editing in vivo, the highly repetitive sgRNA targeting VEGFA site 2 was used; conveniently, the murine and human genomes are identical at this target site.

[0735] Using cultured murine NIH/3T3 cells, it was confirmed that BE3 protein delivery yielded efficient on-target base editing at this locus 34±11% (FIG. 133A; all editing percentages in this paragraph represent mean±s.d. for n=3 biological replicates). The Cutting Frequency Determinant (CFD) algorithm^{29,34} was used to predict off-target loci in the mouse genome associated with the VEGFA site 2 sgRNA (Table 18). Using cultured NIH/3T3 cells, it was confirmed that two of the top four predicted off-target loci are indeed modified by plasmid delivery of BE3 in cultured murine cells (CFD off-target locus 1, 9±5% editing; and CFD off-target locus 4, 3±2% editing; FIG. 133B-133E). Consistent with the results from human cells, protein delivery of BE3 reduced off-target editing to levels similar to that of negative controls (FIGS. 133C and 133E). The mean base editing specificity ratio for CFD off-target loci 1 and 4 increased from 28±13 for plasmid delivery of BE3 to ≥780±300 for protein delivery of BE3 (values represent mean±s.e.m.; n=3 biological replicates).

TABLE 18
Protospacer and PAM sequences for the predicted off-target loci in the
mouse genome associated with the VEGFA site 2 sgRNA. CFD scores⁴⁶ were
calculated using CRISPOR⁴⁷. Positions in the off-target protospacers that
differ from the on-target sequence are underlined.

| | | SEQ ID | | |
|---|---|---|---|---|
| Site | Sequence | NO | CFD score | Description of locus |
| On-target | GACCCCCTCCACCCCGCCTCCGG | 497 | | VEGFA site 2 |
| Off-target 1 | TCCCCCCTCCACCCCACCTCCGG | 498 | 0.7857 | intergenic:mmu-mir-21c- |
| | | | | Nrp1/Mir1903 |
| Off-target 2 | TGCCCACCTCACCCCGCCTCTGG | 499 | 0.65 | intron:Vipr1 |
| Off-target 3 | GCCCCTCCCAACCCCACCTCTGG | 500 | 0.6323 | intron:Nos1ap |
| Off-target 4 | CACCCCCCTCACCCCGCCTCAGG | 501 | 0.625 | intergenic:Unc5b-mmu-mir- |
| | | | | 6408 |

[0736] To establish DNA-free base editing in mice, BE3:sgRNA complexes were combined with Lipofectamine 2000 (FIG. 132B) and intracochlear injections were performed into mouse pups at P1-P2. Injected cochlear tissues were harvested 3-4 days post-injection and micro-dissected into 5-7 samples per cochlear region. Control cochlea from uninjected mice were harvested simultaneously. Genomic DNA was extracted from the harvested tissue, amplified by qPCR to late-exponential phase, and subjected to high-throughput DNA sequencing to measure C→T conversion. Although it is impossible to quantitate base editing efficiency among treated cells because it is not possible to retrieve DNA exclusively from cells exposed to base editor protein, unambiguous base editing was observed from tissue in three regions of the cochlea: the basal end of the organ of Corti, the stria vascularis and the modiolus (FIGS. 132C-132D). No significant indel formation was detected in treated tissue samples (<0.1% indels; FIG. 134B).

[0737] The percentage of cochlear cells containing target C→T conversion (FIG. 132C) was significantly lower than that observed in treated NIH/3T3 cells in culture (FIG. 133A), consistent with the highly localized nature of lipid-based protein delivery and the inability to isolate DNA exclusively from cells exposed to base editor. Nonetheless, local delivery offers key advantages for accessible applications, including control over which cell types are edited, and ease of preparation and administration.

[0738] Finally, off-target editing following intracochlear injection of BE3:sgRNA:lipid complexes was analyzed. Analysis of all four predicted off-target loci, including the confirmed off-target sites CFD locus 1 and CFD locus 4, in genomic DNA from the cochlear tissue of mice injected with the BE3:VEGFA site 2 sgRNA:lipid complex revealed no detectable C→T conversion or indel formation above that observed in untreated controls samples for any of the off-target loci tested (FIG. 134A).

[0739] Together, these in vivo base editing results establish a virus-free, DNA-free strategy for the precise conversion of individual nucleotides in the genomic DNA of animals with high DNA sequence specificity.

### DISCUSSION

[0740] The strategies developed and implemented in this study expand the utility and applicability of base editing by removing or reducing off-target base editing and establishing a DNA-free delivery method that supports in vivo base editing. Protein delivery improves base editing specificity in human and murine cells compared with plasmid delivery of the same constructs (FIGS. 137, 130, and 133), and enables specific base editing in zebrafish and in the mouse cochlea (FIG. 132).

[0741] A high-fidelity base editor was generated by installing into BE3 mutations known to enhance the DNA specificity of Cas9²⁰. The installation of these mutations into Cas9 was reported to result in undetectable indel formation at off target loci associated with non-repetitive sgRNAs, including the EMX1 locus interrogated here (FIG. 127A)²⁰. The specificity enhancements observed in HF-BE3, while substantial, were more modest; HF-BE3 exhibited detectable off-target base editing at both repetitive and non-repetitive loci when delivered as plasmid DNA into mammalian cells (FIGS. 127A, 127D, 133C, and 133E). It is tempting to speculate that this specificity enhancement difference may arise from the fact that base editing, unlike Cas9-mediated indel formation, does not require DNA cleavage but only necessitates DNA-binding and R-loop formation¹⁴, and some of the enhanced specificity of HF-Cas9 may arise from impaired DNA cleavage at already-bound off-target loci.

[0742] In a second attempt to reduce off-target base editing, it was demonstrated that RNP delivery of base editors leads to decoupling of on- and off-target editing (FIG. 128B-128C). RNP delivery ablated off-target editing at non-repetitive sites while maintaining on-target editing comparable to plasmid delivery (FIGS. 130A-130C and 128A), and greatly reduced off-target editing even at the highly repetitive VEGFA site 2 (FIG. 130D). RNP delivery of base editors may be especially useful for in vivo editing applications in which cellular dosage is typically difficult to control or characterize.

[0743] RNP delivery of Cas9 coupled with delivery of a donor DNA template has previously been used to perform HDR-based genome editing in mammalian cells. These approaches, however, remain limited by low efficiency, cell-state dependence, and indel formation efficiencies typically exceeding those of desired HDR outcomes, especially for point mutation correction^{29,30,32,35} DNA-free base editing, in contrast, generates a substantial excess of edited product relative to stochastic indels both in vivo and in cells (FIGS. 132A, 134A, and 134B). To the best of the inventors' knowledge, RNP delivery of base editors represents the first strategy for generating specific and precise modifications to genomic DNA without requiring exogenous DNA.

### Methods

### Cloning of Plasmids

[0744] The plasmids in this study were generated by USER cloning. Phusion U Hot Start polymerase (Thermo Fisher) was used to install point mutations and construct protein expression plasmids from previously reported constructs³⁶. Protein sequences are listed in the Supplementary Information, and plasmids for expression of BE3 and HF-BE3 are available from Addgene.

### Expression and Purification of BE3 and HF-BE3

[0745] BL21 Star (DE3)-competent E. coli cells were transformed with plasmids encoding the bacterial codon optimized base editors with a His₆ N-terminal purification tag. A single colony was grown overnight in Luria-Bertani (LB) broth containing 50 μg mL⁻¹ kanamycin at 37° C. The cells were diluted 1:200 into 2 L of the same media and grown at 37° C. until OD₆₀₀=0.70-0.75. The cultures were incubated on ice for 60 min and protein expression was induced with 0.5 mM isopropyl-β-D-1-thiogalactopyranoside (IPTG, GoldBio). Expression was sustained for 14-16 h with shaking at 18° C. The subsequent purification steps were carried out at 4° C. Cells were collected by centrifugation at 6,000 g for 20 min and resuspended in cell collection buffer (100 mM tris(hydroxymethyl)-aminomethane (Tris)-HCl, pH 8.0, 1 M NaCl, 20% glycerol, 5 mM tris(2-carboxyethyl)phosphine (TCEP; GoldBio), 0.4 mM phenylmethane sulfonyl fluoride (PMSF; Sigma Aldrich) and 1 cOmplete, EDTA-free protease inhibitor pellet (Roche) per 50 mL buffer used). Cells were lysed by sonication (6 min total, 3 s on, 3 s off) and the lysate cleared by centrifugation at 25,000 g (20 min).

[0746] The cleared lysate was incubated with His-Pur nickel nitriloacetic acid (nickel-NTA) resin (1 mL resin per litre of culture, Thermo Fisher) with rotation at 4° C. for 60-90 min. The resin was washed with 20 column volumes of cell collection buffer before bound protein was eluted with elution buffer ((100 mM tris(hydroxymethyl)-aminomethane (Tris)-HCl, pH 8.0, 0.5 M NaCl, 20% glycerol, 5 mM tris (2-carboxyethyl) phosphine (TCEP; GoldBio), 200 mM imidazole). The resulting protein fraction was further purified on a 5 mL Hi-Trap HP SP (GE Healthcare) cation exchange column using an Akta Pure FPLC. Protein-containing fractions were concentrated using a column with a 100,000 kDa cutoff (Millipore) centrifuged at 3,000 g and the concentrated solution was sterile filtered through an 0.22 μm PVDF membrane (Millipore).

[0747] After sterile filtration, proteins were quantified with Reducing Agent Compatible Bicinchoninic acid (BCA) assay (Pierce Biotechnology), snap-frozen in liquid nitrogen and stored in aliquots at −80° C. Sequences of expressed proteins are listed in Supplementary Note 2.

In Vitro Transcription of sgRNA

[0748] Linear DNA fragments containing the T7 RNA polymerase promoter sequence upstream of the desired 20 bp sgRNA protospacer and the sgRNA backbone were generated by PCR (Q5 Hot Start MasterMix, New England Biolabs) using primers as listed in the Supplementary Information and concentrated on minelute columns (Qiagen). sgRNA was transcribed with the HiScribe T7 High Yield RNA Synthesis Kit (New England Biolabs) at 16° C. for 14-16 h with 1 μg of linear template per 20 μL reaction. sgRNA was purified using the MEGAClear Transcription Clean Up Kit (Thermo Fisher), according to the manufacturer's instructions. Purified sgRNAs were stored in aliquots at −80° C.

### In Vitro Deamination Assays

[0749] Sequences of DNA oligonucleotides used as templates for the in vitro deamination assay are shown in Supplementary Note 3. All oligonucleotides were purchased from IDT. Single-stranded oligonucleotides synthesized with complementary sequences were combined (5 μL, of a 100 μM solution) in Tris buffer pH 8.0 and annealed by heating to 95° C. for 5 min, followed by a gradual cooling to 37° C. at a rate of 0.1° C. second⁻¹ to generate 79 base pair (bp) dsDNA substrates. Freshly thawed base-editor proteins (2 μM final concentration in a 10 μL reaction volume) were complexed with the indicated sgRNA (2.2 μM final concentration) in Reaction Buffer (20 mM HEPES pH 7.5, 150 mM KCl, 0.5 mM DTT, 0.1 mM EDTA, 10 mM MgCl₂)³⁷ for five minutes at room temperature. Annealed dsDNA substrates were then added to a final concentration of 250 nM. The reaction proceeded for 30 min at 37° C. before protein denaturation was performed by heating for 5 min at 99° C. Addition of PB buffer (Qiagen, 100 μL) and isopropanol (25 μL) ensured protein was dissociated from the substrate DNA. DNA was purified with Minelute columns (Qiagen) and the resulting products amplified to the top of the linear range with 15 cycles of qPCR (12 ng input DNA, 50 μL reaction volume) using a U-tolerant polymerase (Phusion U Hot Start, ThermoFisher) and primers as listed in the Supplementary Information. Amplified DNA was purified using RapidTip2 (Diffinity Genomics) and barcoded with a second round of PCR (8 cycles, 5 ng input) before being prepared for sequencing on an Illumina MiSeq as described below.

### Purification and Sequencing of Genomic DNA

[0750] Genomic DNA was isolated using Agencourt DNAdvance Genomic DNA Isolation Kit (Beckman Coulter) according to the manufacturer's instructions. For the first PCR, DNA was amplified to the top of the linear range using Q5 Hot Start DNA Polymerase (NEB), according to the manufacturer's instructions but with the addition of 3% DMSO and SYBR Gold Nucleic Acid Stain (Thermo Fisher). For all amplicons, the PCR protocol used was an initial heating step of 2 min at 98° C. followed by an optimized number of amplification cycles (12 s at 98° C., 25 s at 61° C., 30 s at 72° C.). For zebrafish and for transfected cell samples, 30 ng of input DNA was used in a 50 μL reaction, for cochlear samples 20 ng was used in a 25 μL reaction. qPCR was performed to determine the optimal cycle number for each amplicon. Amplified DNA was purified using RapidTip2 (Diffinity Genomics) and barcoded with a further PCR (8 cycles, 5 ng input). The unique forward and reverse primers used in the first-round PCR contained a constant region 5′ to the annealing region, (forward: 5′-ACACTCTTTCCCTACACGACGCTCTTCCGATCTNNNN-3′ (SEQ ID NO: 502), reverse: 5′-TGGAGTTCAGACGTGTGCTCTTCCGATCT-3′(SEQ ID NO: 503)) which facilitated binding of barcoding primers to amplified DNA for a second-round PCR.

[0751] The second-round PCR used primers with three regions: a 5′ constant region allowing the amplicon to bind to the Illumina flow cell (italicized), an 8-base barcoding region (X), and a 3′ constant region allowing the barcoding primer to bind to the first-round PCR amplicon (in bold). Examples of primer sequences are:

forward:

(SEQ ID NO: 504)

5′-AATGATACGGCGACCACCGAGATCTACACXXXXXXXXACACTCTTTC
CCTACACGAC-3′
reverse:

(SEQ ID NO: 505)

5′-CAAGCAGAAGACGGCATACGAGATXXXXXXXGTGACTGGAGTTCAGA
CGTGTGCTCTTC-3′

[0752] Sequencing adapters and dual-barcoding sequences are based on the TruSeq Indexing Adapters (Illumina). Barcoded samples were pooled and purified by gel extraction (Qiagen), and then purified using Ampure beads (Beckman Coulter) before quantification using the Qubit dsDNA HS Kit (Thermo Fisher) and qPCR (KAPA BioSystems) according to the manufacturer's instructions. Sequencing of pooled samples was performed using a single-end read from 180-250 bases (depending on the amplicon size) on the MiSeq (I lumina) according to the manufacturer's instructions.

[0753] Sequences of oligonucleotides used for PCR amplification are shown in Supplementary Note 3. All oligonucleotides were obtained from IDT. The optimized number of PCR cycles for each amplicon in this study are as follows: VEGFA site 2 human genomic DNA (annealing temperature was 61° C. for 25 seconds for all extension steps): on-target: 29 cycles, off-target #1: 32 cycles, off-target #2: 28 cycles, off-target #3: 27 cycles, off-target #4: 27 cycles, VEGFA site 2 murine genomic DNA: on-target: 31 cycles, off-targets #1, #2, #3 and #4: 31 cycles. HEK293 site 3: off-targets #1: 29 cycles, off-target #2: 28 cycles, off-target #3: 28 cycles. FANCF off-target #1: 29 cycles, off-target #2: 28 cycles, off-target 3: 28 cycles. EMX1 off-targets #1, #2 and #3: 28 cycles. TYR1, TYR2 and TYR3 sgRNAs for amplification of zebrafish DNA: 32 cycles. Optimized protocols for the on-target amplification of the EMX1, FANCF, and HEK293 site 3 loci were followed as previously described¹⁴.

### Analysis and Alignment of Genomic DNA Sequencing Reads

[0754] Sequencing reads were analyzed as previously described¹⁴. In brief, sequencing reads were demultiplexed using MiSeq Reporter (Illumina), and individual FASTQ files were analyzed with a previously reported custom Matlab script¹⁴. Reads were aligned to the reference sequence using the Smith-Waterman algorithm. Base calls with Q-scores below 30 were replaced with a placeholder nucleotide (N). This quality threshold results in nucleotide frequencies with an expected error rate of 1 in 1,000. Indel frequencies were quantified with a previously published custom Matlab script which counts indels which occurring in a 30-base window around the nCas9 cleavage site and are a minimum of 2-base insertions or deletions¹⁴. Indels were defined as detectable if there was a significant difference (Student's two-tailed t-test, p<0.05) between indel formation in the treated sample and untreated control.

[0755] For one of the sequenced amplicons, CFD off-target #3, associated with VEGFA site 2 sgRNA in the murine genome, it was not possible to accurately measure indel formation. The protospacer at this locus is directly preceded by 12 guanine bases, which makes PCR and high-throughput sequencing of this site prone to random insertion or deletions; deletion rates as high as 20% of sequencing reads were observed in multiple independent untreated control samples. Since no significant base editing was detected at this off-target locus under any treatment conditions (FIGS. 132 and 133), it is suspected that indel formation is also negligible at this locus.

[0756] A phred.II Q30 score corresponds to an estimated 99.9% accuracy in basecalling³⁸. A 0.1% probability of incorrect base calling at a given position corresponds to a lower limit for base calling of 0.1/4=0.025% if it is assumed base call errors are randomly distributed across the four bases. C→T editing percentages that fell beneath this threshold were classified as undetectable. Spontaneous deamination³⁹ or polymerase error during PCR can also introduce artefactual C→T edits. In order to distinguish base editor-induced C→T editing from artefactual C→T editing rates, untreated control cells were sequenced for each amplicon and it was calculated whether the C→T editing under a particular condition was statistically significant using the Student's two-tailed t-test with p<0.05 as the threshold. Off-target sites with statistically significant editing rates >0.025% were considered measureable. The number of aligned and quality filtered reads for each sample has been included in Table 17.

### Statistical Analyses of Genomic DNA Sequence Alignments

[0757] Unless otherwise noted, mean values cited throughout the main text are representative of n≥3 independent biological replicates and the mean±standard deviation has been stated.

[0758] The statistical analysis of the high-throughput sequencing data displayed in FIGS. 2 and 3 was performed by comparing on- and off-target editing percentages in treated samples to any editing measured in a negative control sample (untreated). The Student's two-tailed t test was used, and individual p-values are shown in Table 16. *p≤0.05, **p≤0.01 and ***p≤0.001. When editing was below the detection limit (0.025%), significance was not calculated; all untreated control samples showed undetectable editing.

[0759] For FIG. 128A, mean on-target base editing was calculated by averaging editing of cytosines in the base editing activity window (C₄-C₈ for HEK293 site 3 and EMX1, C₄-C₉ for FANCF and VEGFA site 2).

[0760] To account for sgRNA-dependent differences in base editing activity, the a base editing:indel ratio was calculated (FIG. 130B). This ratio was generated by dividing the percentage of HTS reads with a C→T conversion (averaged across the base editing window for each site) by the percentage of HTS reads containing an indel. As described above, if the off-target editing for a particular locus was below the limit of detection it was conservatively assumed the estimated upper bound of the detection method (0.025%) for the purpose of calculating specificity ratios.

### Data Analysis of In Vitro Edited DNA

[0761] Sequencing reads were automatically demultiplexed using MiSeq Reporter (Illumina.). Quality filtering was performed using the online package usegalaxy.org⁴⁰. Individual bases with an Illumina quality score less than or equal to 30 were converted to the placeholder nucleotide ‘N’ using FASTQ Groomer followed by FASTA Masker⁴¹. The resulting quality-filtered FASTQ files were subsequently analysed with a custom python script provided in Supplementary Note 1. Sequencing reads were scanned for exact matches to two 14-base sequences that flank both sides of the target DNA sequence. If no exact matches were found, the read was excluded from analysis. If both 14-base sequences were located and the length of the sequence between them was equal to the expected protospacer length (20 bases), the protospacer sequence found between the flanking regions was saved and the bases called by high-throughput sequencing at each site within the protospacer were tallied.

### Cell Culture

[0762] Both HEK293T (ATCC CRL-3216) and NIH/3T3 (ATCC CRL-1658) were maintained in Dulbecco's Modified Eagle's Medium plus GlutaMax (ThermoFisher) supplemented with 10% (v/v) fetal bovine serum (FBS), at 37° C. with 5% CO₂. Cells were obtained from ATCC and were authenticated and verified to be free of mycoplasma by ATCC upon purchase.

Plasmid Transfection of Base Editors into HEK293T Cells

[0763] HEK293T cells were seeded on 48-well collagen-coated BioCoat plates (Corning) in antibiotic free medium and transfected at approximately 70% confluency. Unless otherwise noted, 750 ng of BE and 250 ng of sgRNA expression plasmids were transfected using 1.5 μl of Lipofectamine 2000 (Thermo Fisher) per well according to the manufacturer's protocol.

Protein Transfection of Base Editors into HEK293T Cells

[0764] HEK293T cells were seeded on 48-well collagen-coated BioCoat plates (Corning) in 250 μL antibiotic free medium and transfected at approximately 70% confluency. Base editor protein and was incubated with 1.1× molar excess of the necessary sgRNA at room temperature for 5 min. The complex was then incubated with 1.5 μL Lipofectamine 2000 (Thermo Fisher) and transfected according to the manufacturer's protocol for plasmid delivery. Unless otherwise noted, BE protein was added to a final concentration of 200 nM (based on a total well volume of 275 μL).

Plasmid Transfection of Base Editors into NIH/3T3 Cells

[0765] NIH/3T3 cells were seeded on 48-well collagen-coated BioCoat plates (Corning) in antibiotic-free DMEM medium and transfected at approximately 75% confluency. Unless otherwise noted, 600 ng of BE and 200 ng of sgRNA expression plasmids were transfected using 1.4 μL of Lipofectamine 3000 with 1 μL of P3000 reagent (Thermo Fisher) per well according to the manufacturer's protocol.

Protein Transfection of Base Editors into NIH/3T3 Cells

[0766] NIH/3T3 cells were seeded on 48-well collagen-coated BioCoat plates (Corning) in antibiotic free DMEM medium and transfected at approximately 75% confluency. Base editor proteins were incubated with 1.1-fold molar excess of the indicated sgRNA at 25° C. for 5 min. The complex was then incubated with 1.4 μL Lipofectamine 3000 (Thermo Fisher) and transfected according to the manufacturer's protocol for plasmid delivery. P3000 reagent was not used because its addition lead to protein precipitation and a reduction in base editing efficiency. Unless otherwise noted, BE protein was added to a final concentration of 400 nM (based on a total well volume of 275 μL).

### Intracochlear Delivery of BE3 Protein: Guide RNA Encapsulated in Cationic Lipid

[0767] All animal experiments were approved by the Institutional Animal Care and the Use Committee of the Massachusetts Eye and Ear Infirmary. Intracochlear delivery was performed in P1-P2 mice of a mixed genetic background as described previously⁴². Mice were anesthetized by lowering body temperature before the surgical procedure. A postauricular incision was made near the right ear, and the bulla was lifted to expose the cochlea. BE3 protein (57.7 μM) was pre-complexed with the sgRNA (100 μM) in a 1:1.1 molar ratio and then mixed with Lipofectamine 2000 (Thermo Fisher) in a 1:1 volumetric ratio. The resulting solution (1.2-1.5 μL) was injected with a glass pipette (end diameter, 5 μm) through the cochlear capsule into scala media at the cochear basal turn that attached to a nanoliter micropump (WPI, UMP3+Micro4+NanoFil) at the rate of 250 nL min⁻¹. After injection, the incision was closed and the mice were brought onto a heating pad to recover. After 3-4 days, the cochlea of mouse was dissected into the organ of Corti, stria vascularis, and modiolus. Each tissue was further micro-dissected into between 5 and 7 separate pieces and DNA extraction was performed separately for each sample, followed by high-throughput sequencing as described above. The data presented in FIG. 132 and FIG. 134 show sequencing data resulting from extraction of one micro-dissected sample for each cochlear region.

Microinjection of BE3 Protein: Guide RNA into Zebrafish Embryo

[0768] Zebrafish (Tuebingen strain) were maintained under standard conditions in compliance with internal regulatory review at Boston Children's Hospital. One-cell stage zebrafish embryos were injected with approximately 2 nL of BE3 protein pre-complexed with the appropriate sgRNA or an unrelated sgRNA control in a 1:1 molar ratio (4.5 μM final concentration). Four days post-fertilization, DNA was extracted from larvae as previously described⁴³ in 50 mM NaOH for 30 minutes at 95° C. and the resulting solution was neutralized with Tris-HCl. Genomic DNA was quantified, amplified by PCR, and sequenced as described above.

### Protein Gel Analyses

[0769] All protein gels shown were precast 4-12% polyacrylamide Bis-Tris Plus (Thermo Fisher). They were run in MOPS buffer (Thermo Fisher) at 180 V for 50 min. Samples were prepared for loading by heating to 99° C. in 100 mM DTT and 1× lithium dodecyl sulfate (LDS) Sample Buffer for denaturation (Thermo Fisher) for 10 min. Gels were stained using Instant Blue Protein Stain (Expedion) according to manufacturer's instructions.

[0770] For cell lysate analysis, 2 mL of post-induction overnight culture was pelleted at 15,000 g before lysis in 100 μL B-PER (Thermo Fisher) according to the manufacturer's instructions.

### Data Availability

[0771] High-throughput sequencing data that support the findings of this study have been deposited in the NCBI Sequence Read Archive database under Accession Number SRP097884. Plasmids encoding HF-BE3 and BE3 for protein expression, as well as HF-BE3 for mammalian expression, are available from Addgene with Accession IDs 87439 (pCMV—HF-BE3), 87438 (pET42b-HF-BE3), 87437 (pET42b-BE3).

### REFERENCES

[0772] 1 Cox, D. B., Platt, R. J. & Zhang, F. Therapeutic genome editing: prospects and challenges. Nature medicine 21, 121-131, doi:10.1038/nm.3793 (2015).
[0773] 2 Doudna, J. A. & Charpentier, E. Genome editing. The new frontier of genome engineering with CRISPR-Cas9. Science 346, 1258096, doi:10.1126/science.1258096 (2014).
[0774] 3 Komor, A. C., Badran, A. H. & Liu, D. R. CRISPR-Based Technologies for the Manipulation of Eukaryotic Genomes. Cell 168, 20-36, doi:10.1016/j.cell.2016.10.044 (2017).
[0775] 4 Sander, J. D. & Joung, J. K. CRISPR-Cas systems for editing, regulating and targeting genomes. Nature biotechnology 32, 347-355, doi:10.1038/nbt.2842 (2014).
[0776] 5 Hilton, I. B. & Gersbach, C. A. Enabling functional genomics with genome engineering. Genome Res 25, 1442-1455, doi:10.1101/gr.190124.115 (2015).
[0777] 6 Wyman, C. & Kanaar, R. DNA double-strand break repair: all's well that ends well. Annual review of genetics 40, 363-383, doi:10.1146/annurev.genet.40.110405.090451 (2006).
[0778] 7 Ran, F. A. et al. Genome engineering using the CRISPR-Cas9 system. Nat Protoc 8, 2281-2308, doi:10.1038/nprot.2013.143 (2013).
[0779] 8 Cong, L. et al. Multiplex genome engineering using CRISPR/Cas systems. Science 339, 819-823, doi:10.1126/science.1231143 (2013).
[0780] 9 Bodles-Brakhop, A. M., Heller, R. & Draghia-Akli, R. Electroporation for the Delivery of DNA-based Vaccines and Immunotherapeutics: Current Clinical Developments. Mol Ther 17, 585-592, doi:10.1038/mt.2009.5 (2009).
[0781] 10 Kay, M. A., Glorioso, J. C. & Naldini, L. Viral vectors for gene therapy: the art of turning infectious agents into vehicles of therapeutics. Nature medicine 7, 33-40, doi:Doi 10.1038/83324 (2001).
[0782] 11 Midoux, P., Pichon, C., Yaouanc, J. J. & Jaffres, P. A. Chemical vectors for gene delivery: a current review on polymers, peptides and lipids containing histidine or imidazole as nucleic acids carriers. Brit J Pharmacol 157, 166-178, doi:10.1111/j.1476-5381.2009.00288.x (2009).
[0783] 12 Yin, H. et al. Genome editing with Cas9 in adult mice corrects a disease mutation and phenotype. Nature biotechnology 32, 551-553, doi:10.1038/nbt0914-952d (2014).
[0784] 13 Hu, J. H., Davis, K. M. & Liu, D. R. Chemical Biology Approaches to Genome Editing: Understanding, Controlling, and Delivering Programmable Nucleases. Cell chemical biology 23, 57-73, doi:10.1016/j.chembio1.2015.12.009 (2016).
[0785] 14 Komor, A. C., Kim, Y. B., Packer, M. S., Zuris, J. A. & Liu, D. R. Programmable editing of a target base in genomic DNA without double-stranded DNA cleavage. Nature 533, 420-424, doi:10.1038/nature17946 (2016).
[0786] 15 Hess, G. T. et al. Directed evolution using dCas9-targeted somatic hypermutation in mammalian cells. Nature methods 13, 1036-1042, doi:10.1038/nmeth.4038 (2016).
[0787] 16 Ma, Y. et al. Targeted AID-mediated mutagenesis (TAM) enables efficient genomic diversification in mammalian cells. Nature methods 13, 1029-1035, doi:10.1038/nmeth.4027 (2016).
[0788] 17 Nishida, K. et al. Targeted nucleotide editing using hybrid prokaryotic and vertebrate adaptive immune systems. Science 353, aaf8729, doi:10.1126/science.aaf8729 (2016).
[0789] 18 Li, J., Sun, Y., Du, J., Zhao, Y. & Xia, L. Generation of targeted point mutations in rice by a modified CRISPR/Cas9 system. Mol Plant In Press, doi:10.1016/j.molp.2016.12.001 (2016).
[0790] 19 Koyama, S., Ishii, K. J., Coban, C. & Akira, S. Innate immune response to viral infection. Cytokine 43, 336-341, doi:10.1016/j.cyto.2008.07.009 (2008).
[0791] 20 Kleinstiver, B. P. et al. High-fidelity CRISPR-Cas9 nucleases with no detectable genome-wide off-target effects. Nature 529, 490-495, doi:10.1038/nature16526 (2016).
[0792] 21 Hsu, P. D. et al. DNA targeting specificity of RNA-guided Cas9 nucleases. Nature biotechnology 31, 827-832, doi:10.1038/nbt.2647 (2013).
[0793] 22 Fu, Y. F. et al. High-frequency off-target mutagenesis induced by CRISPR-Cas nucleases in human cells. Nature biotechnology 31, 822-826, doi:10.1038/nbt.2623 (2013).
[0794] 23 Pattanayak, V. et al. High-throughput profiling of off-target DNA cleavage reveals RNA-programmed Cas9 nuclease specificity. Nature biotechnology 31, 839-843, doi:10.1038/nbt.2673 (2013).
[0795] 24 Tsai, S. Q. et al. GUIDE-seq enables genome-wide profiling of off-target cleavage by CRISPR-Cas nucleases. Nature biotechnology 33, 187-197, doi:10.1038/nbt.3117 (2015).
[0796] 25 Guilinger, J. P. et al. Broad specificity profiling of TALENs results in engineered nucleases with improved DNA-cleavage specificity. Nature methods 11, 429-435, doi:10.1038/nmeth.2845 (2014).
[0797] 26 Singh, R., Kuscu, C., Quinlan, A., Qi, Y. J. & Adli, M. Cas9-chromatin binding information enables more accurate CRISPR off-target prediction. Nucleic acids research 43, 677-683, doi:ARTN e118
   10.1093/nar/gkv575 (2015).
[0798] 27 Liang, X. Q. et al. Rapid and highly efficient mammalian cell engineering via Cas9 protein transfection. J Biotechnol 208, 44-53, doi:10.1016/jpiotec.2015.04.024 (2015).
[0799] 28 Wang, M. et al. Efficient delivery of genome-editing proteins using bioreducible lipid nanoparticles. Proceedings of the National Academy of Sciences of the United States of America 113, 2868-2873, doi:10.1073/pnas.1520244113 (2016).
[0800] 29 Zuris, J. A. et al. Cationic lipid-mediated delivery of proteins enables efficient protein-based genome editing in vitro and in vivo. Nature biotechnology 33, 73-80, doi:10.1038/nbt.3081 (2015).
[0801] 30 DeWitt, M. A. et al. Selection-free genome editing of the sickle mutation in human adult hematopoietic stem/progenitor cells. Sci Transl Med 8, 360ra134, doi:10.1126/scitranslmed.aaf9336 (2016).
[0802] 31 Kim, K. et al. Highly efficient RNA-guided base editing in mouse embryos. Nature biotechnology, doi:10.1038/nbt.3816 (2017).
[0803] 32 Richardson, C. D., Ray, G. J., DeWitt, M. A., Curie, G. L. & Corn, J. E. Enhancing homology-directed genome editing by catalytically active and inactive CRISPR-Cas9 using asymmetric donor DNA. Nature biotechnology 34, 339-344, doi:10.1038/nbt.3481 (2016).
[0804] 33 Lin, Y. C. et al. Genome dynamics of the human embryonic kidney 293 lineage in response to cell biology manipulations. Nature communications 5, 4767, doi:10.1038/ncomms5767 (2014).
[0805] 34 Davis, K. M., Pattanayak, V., Thompson, D. B., Zuris, J. A. & Liu, D. R. Small molecule-triggered Cas9 protein with improved genome-editing specificity. Nat Chem Biol 11, 316-318, doi:10.1038/Nchembio.1793 (2015).
[0806] 35 Lin, S., Staahl, B., Alla, R. K. & Doudna, J. A. Enhanced homology-directed human genome engineering by controlled timing of CRISPR/Cas9 delivery. Elife, e04766, doi:10.7554/eLife.04766 (2014).
[0807] 36 Doench, J. G. et al. Optimized sgRNA design to maximize activity and minimize off-target effects of CRISPR-Cas9. Nature biotechnology 34, 184-191, doi:10.1038/nbt.3437 (2016).
[0808] 37 Jinek, M. et al. A Programmable Dual-RNA-Guided DNA Endonuclease in Adaptive Bacterial Immunity. Science 337, 816-821, doi:10.1126/science.1225829 (2012).
[0809] 38 Ewing, B. & Green, P. Base-calling of automated sequencer traces using phred. II. Error probabilities. Genome Res 8, 186-194 (1998).
[0810] 39 Liu, M. & Schatz, D. G. Balancing AID and DNA repair during somatic hypermutation. Trends in immunology 30, 173-181, doi:10.1016/j.it.2009.01.007 (2009).
[0811] 40 Afgan, E. et al. The Galaxy platform for accessible, reproducible and collaborative biomedical analyses: 2016 update. Nucleic acids research 44, W3-W10, doi:10.1093/nar/gkw343 (2016).
[0812] 41 Blankenberg, D. et al. Manipulation of FASTQ data with Galaxy. Bioinformatics 26, 1783-1785, doi:10.1093/bioinformatics/btq281 (2010).
[0813] 42 Hu, L. X. et al. Diphtheria Toxin-Induced Cell Death Triggers Wnt-Dependent Hair Cell Regeneration in Neonatal Mice. J Neurosci 36, 9479-9489, doi:10.1523/Jneurosci.2447-15.2016 (2016).
[0814] 43 Meeker, N. D., Hutchinson, S. A., Ho, L. & Trede, N. S. Method for isolation of PCR-ready genomic DNA from zebrafish tissues. Biotechniques 43, 610, 612, 614 (2007).
[0815] 44 Zuris, J. A. et al. Cationic lipid-mediated delivery of proteins enables efficient protein-based genome editing in vitro and in vivo. Nature biotechnology 33, 73-80 (2015).
[0816] 45 Tsai, S. Q. et al. GUIDE-seq enables genome-wide profiling of off-target cleavage by CRISPR-Cas nucleases. Nature biotechnology 33, 187-197 (2015).
[0817] 46 Doench, J. G. et al. Optimized sgRNA design to maximize activity and minimize off-target effects of CRISPR-Cas9. Nature biotechnology 34, 184-191 (2016).
[0818] 47 Haeussler, M. et al. Evaluation of off-target and on-target scoring algorithms and integration into the guide RNA selection tool CRISPOR. Genome Biol 17, 148 (2016).

### Supplementary Information

Supplementary Note 1: Python script used to analyze quality-filtered in vitro-edited DNA.

| | |
|---|---|
| 1. | from_future_import print_function |
| 2. | from_future_import division |
| 3. | |
| 4. | import Bio #This will import the BioPython suite |
| 5. | from Bio import SeqIO #Necessary to read/write sequence handles |
| 6. | from Bio.Seq import Seq |
| 7. | import os |
| 8. | import collections |
| 9. | import csv |
| 10. | |
| 11. | inputfile = “please_specify_your_input_file_here_containing_filtered_reads” #specify |

the filenames that contain sequences

| | |
|---|---|
| 12. | filenames = [ ] |
| 13. | |
| 14. | for file in os.listdir(inputfile): |
| 15. | if file.endswith(“.fastqsanger”): |
| 16. | filenames.append(file) |
| 17. | |
| 18. | spacer = [ ] |
| 19. | list_of_filenames = [ ] |
| 20. | |
| 21. | for file in filenames: |
| 22. | site = { } |
| 23. | output = open(file + “.txt”, “w”) |
| 24. | list_of_filenames.append(file + “.txt”) #allows calling of the txt files that come |

from fastq files later

| | |
|---|---|
| 25. | for rec in SeqIO.parse(file, “fastq”): |
| 26. | split1=rec.seq.tostring( ).split(“GTTCGCGGCGATCG”) #14- |

base pair constant_region_before_protospacer

| | |
|---|---|
| 27. | if len(split1)>=2: |
| 28. | split2=split1[1].split(“TGGATCGCCTGGCA”) #14- |

base pairc constant_region_after_protospacer

| | |
|---|---|
| 29. | site=split2[0] |
| 30. | if len(site)==20: |
| 31. | output.write(site + “\n”) |
| 32. | |
| 33. | BASES = ‘ATGCN’ |
| 34. | UNRECOGNIZED = ‘X’ |
| 35. | BASE_SEPERATOR = dict(zip(BASES, ‘,,,,\n’)) |
| 36. | a_index = 0 |
| 37. | t_index = 1 |
| 38. | g_index = 2 |
| 39. | c_index = 3 |
| 40. | n_index = 4 |
| 41. | |
| 42. | def get_counts_by_column(base, count, library): |
| 43. | current_count = library[count] |
| 44. | if_base == ‘A’: |
| 45. | current_count[a_index] += 1 |
| 46. | elif base == ‘T’: |
| 47. | current_count[t_index] += 1 |
| 48. | elif base == ‘G’ |
| 49. | current_count[g_index] += 1 |
| 50. | elif base == ‘C’: |
| 51. | current_count[c_index] += 1 |
| 52. | elif base == ‘N’: |
| 53. | current_count[n_index] += 1 |
| 54. | |
| 55. | def dna_counts(list_of_sequences, sample): |
| 56. | first_oligo = list_of_sequences[0] |
| 57. | for i in range (len(first_oligo)): |
| 58. | sample.append([0,0,0,0,0]) |
| 59. | for j in range(len(first_oligo)): |
| 60. | for i in range(len(list_of_sequences)): |
| 61. | get_counts_by_column(list_of_sequences[i][j], j, libname) |
| 62. | |
| 63. | |
| 64. | for file in list_of_filenames: |
| 65. | spacer_list = open(file).read( ).splitlines( ) |
| 66. | output2=[ ] |
| 67. | dna_counts(spacer_list, output2) |
| 68. | with open(file + “.csv”, “wb”) as f: |
| 69. | writer = csv.writer(f) |
| 70. | writer.writerows(output2) |

Supplementary Note 2: Sequences of proteins used
in this study

Protein sequence of expressed BE3
MGSSHHHHHHSSETGPVAVDPTLRRRIEPHEFEVFFDPRELRKETCLLYE
INWGGRHSIWRHTSQNTNKHVEVNFIEKFTTERYFCPNTRCSITWFLSWS
PCGECSRAITEFLSRYPHVTLFIYIARLYHHADPRNRQGLRDLISSGVTI
QIMTEQESGYCWRNFVNYSPSNEAHWPRYPHLWVRLYVLELYCIILGLPP
CLNILRRKQPQLTFFTIALQSCHYQRLPPHILWATGLKSGSETPGTSESA
TPESDKKYSIGLAIGTNSVGWAVITDEYKVPSKKFKVLGNTDRHSIKKNL
IGALLFDSGETAEATRLKRTARRRYTRRKNRICYLQEIFSNEMAKVDDSF
FHRLEESFLVEEDKKHERHPIFGNIVDEVAYHEKYPTIYHLRKKLVDSTD
KADLRLIYLALAHMIKFRGHFLIEGDLNPDNSDVDKLFIQLVQTYNQLFE
ENPINASGVDAKAILSARLSKSRRLENLIAQLPGEKKNGLFGNLIALSLG
LTPNFKSNFDLAEDAKLQLSKDTYDDDLDNLLAQIGDQYADLFLAAKNLS
DAILLSDILRVNTEITKAPLSASMIKRYDEHHQDLTLLKALVRQQLPEKY
KEIFFDQSKNGYAGYIDGGASQEEFYKFIKPILEKMDGTEELLVKLNRED
LLRKQRTFDNGSIPHQIHLGELHAILRRQEDFYPFLKDNREKIEKILTFR
IPYYVGPLARGNSRFAWMTRKSEETITPWNFEEVVDKGASAQSFIERMTN
FDKNLPNEKVLPKHSLLYEYFTVYNELTKVKYVTEGMRKPAFLSGEQKKA
IVDLLFKTNRKVTVKQLKEDYFKKIECFDSVEISGVEDRFNASLGTYHDL
LKIIKDKDFLDNEENEDILEDIVLTLTLFEDREMIEERLKTYAHLFDDKV
MKQLKRRRYTGWGRLSRKLINGIRDKQSGKTILDFLKSDGFANRNFMQLI
HDDSLTFKEDIQKAQVSGQGDSLHEHIANLAGSPAIKKGILQTVKVVDEL
VKVMGRHKPENIVIEMARENQTTQKGQKNSRERMKRIEEGIKELGSQILK
EHPVENTQLQNEKLYLYYLQNGRDMYVDQELDINRLSDYDVDHIVPQSFL
KDDSIDNKVLTRSDKNRGKSDNVPSEEVVKKMKNYWRQLLNAKLITQRKF
DNLTKAERGGLSELDKAGFIKRQLVETRQITKHVAQILDSRMNTKYDEND
KLIREVKVITLKSKLVSDFRKDFQFYKVREINNYHHAHDAYLNAVVGTAL
IKKYPKLESEFVYGDYKVYDVRKMIAKSEQEIGKATAKYFFYSNIMNFFK
TEITLANGEIRKRPLIETNGETGEIVWDKGRDFATVRKVLSMPQVNIVKK
TEVQTGGFSKESILPKRNSDKLIARKKDWDPKKYGGFDSPTVAYSVLVVA
KVEKGKSKKLKSVKELLGITIMERSSFEKNPIDFLEAKGYKEVKKDLIIK
LPKYSLFELENGRKRMLASAGELQKGNELALPSKYVNFLYLASHYEKLKG
SPEDNEQKQLFVEQHKHYLDEIIEQISEFSKRVILADANLDKVLSAYNKH
RDKPIREQAENIIHLFTLTNLGAPAAFKYFDTTIDRKRYTSTKEVLDATL
IHQSITGLYETRIDLSQLGGDSGGSTNLSDIIEKETGKQLVIQESILMLP
EEVEEVIGNKPESDILVHTAYDESTDENVMLLTSDAPEYKPWALVIQDSN
GENKIKMLSGGSPKKKRKV (SEQ ID NO: 185)
Protein sequence of expressed HF-BE3
MGSSHHHHHHSSETGPVAVDPTLRRRIEPHEFEVFFDPRELRKETCLLYE
INWGGRHSIWRHTSQNTNKHVEVNFIEKFTTERYFCPNTRCSITWFLSWS
PCGECSRAITEFLSRYPHVTLFIYIARLYHHADPRNRQGLRDLISSGVTI
QIMTEQESGYCWRNFVNYSPSNEAHWPRYPHLWVRLYVLELYCIILGLPP
CLNILRRKQPQLTFFTIALQSCHYQRLPPHILWATGLKSGSETPGTSESA
TPESDKKYSIGLAIGTNSVGWAVITDEYKVPSKKFKVLGNTDRHSIKKNL
IGALLFDSGETAEATRLKRTARRRYTRRKNRICYLQEIFSNEMAKVDDSF
FHRLEESFLVEEDKKHERHPIFGNIVDEVAYHEKYPTIYHLRKKLVDSTD
KADLRLIYLALAHMIKFRGHFLIEGDLNPDNSDVDKLFIQLVQTYNQLFE
ENPINASGVDAKAILSARLSKSRRLENLIAQLPGEKKNGLFGNLIALSLG
LTPNFKSNFDLAEDAKLQLSKDTYDDDLDNLLAQIGDQYADLFLAAKNLS
DAILLSDILRVNTEITKAPLSASMIKRYDEHHQDLTLLKALVRQQLPEKY
KEIFFDQSKNGYAGYIDGGASQEEFYKFIKPILEKMDGTEELLVKLNRED
LLRKQRTFDNGSIPHQIHLGELHAILRRQEDFYPFLKDNREKIEKILTFR
IPYYVGPLARGNSRFAWMTRKSEETITPWNFEEVVDKGASAQSFIERMTA
FDKNLPNEKVLPKHSLLYEYFTVYNELTKVKYVTEGMRKPAFLSGEQKKA
IVDLLFKTNRKVTVKQLKEDYFKKIECFDSVEISGVEDRFNASLGTYHDL
LKIIKDKDFLDNEENEDILEDIVLTLTLFEDREMIEERLKTYAHLFDDKV
MKQLKRRRYTGWGALSRKLINGIRDKQSGKTILDFLKSDGFANRNFMALI
HDDSLTFKEDIQKAQVSGQGDSLHEHIANLAGSPAIKKGILQTVKVVDEL
VKVMGRHKPENIVIEMARENQTTQKGQKNSRERMKRIEEGIKELGSQILK
EHPVENTQLQNEKLYLYYLQNGRDMYVDQELDINRLSDYDVDHIVPQSFL
KDDSIDNKVLTRSDKNRGKSDNVPSEEVVKKMKNYVVRQLLNAKLITQRK
FDNLTKAERGGLSELDKAGFIKRQLVETRAITKHVAQILDSRMNTKYDEN
DKLIREVKVITLKSKLVSDFRKDFQFYKVREINNYHHAHDAYLNAVVGTA
LIKKYPKLESEFVYGDYKVYDVRKMIAKSEQEIGKATAKYFFYSNIMNFF
KTEITLANGEIRKRPLIETNGETGEIVWDKGRDFATVRKVLSMPQVNIVK
KTEVQTGGFSKESILPKRNSDKLIARKKDWDPKKYGGFDSPTVAYSVLVV
AKVEKGKSKKLKSVKELLGITIMERSSFEKNPIDFLEAKGYKEVKKDLII
KLPKYSLFELENGRKRMLASAGELQKGNELALPSKYVNFLYLASHYEKLK
GSPEDNEQKQLFVEQHKHYLDEIIEQISEFSKRVILADANLDKVLSAYNK
HRDKPIREQAENIIHLFTLTNLGAPAAFKYFDTTIDRKRYTSTKEVLDAT
LIHQSITGLYETRIDLSQLGGDSGGSTNLSDIIEKETGKQLVIQESILML
PEEVEEVIGNKPESDILVHTAYDESTDENVMLLTSDAPEYKPWALVIQDS
NGENKIKMLSGGSPKKKRKV (SEQ ID NO: 186)

Supplementary Note 3: Sequences of oligonucleotides used in the present study
Unpublished Primers used to amplify off target genomic DNA for HTS in human cells (SEQ ID NOS: 506-513)

| | |
|---|---|
| fwd_VEGFA_site2_off_target_1_human | ACACTCTTTCCCTACACGACGCTCTTCCGATCTNNNNTCCTACAAGTAACAGTCCAAGAA |
| rev_VEGFA_site2_off_target_1_human | TGGAGTTCAGACGTGTGCTCTTCCGATCTTTCTGCAACTTAACTTACGTGAAA |
| fwd_VEGFA_site2_off_target_2_human | ACACTCTTTCCCTACACGACGCTCTTCCGATCTNNNNACCAAGCCCATTTGTCCAGG |
| rev_VEGFA_site2_off_target_2_human | TGGAGTTCAGACGTGTGCTCTTCCGATCTTCCTTCTTTTTGAGCTTTGGGC |
| fwd_VEGFA_site2_off_target_3_human | ACACTCTTTCCCTACACGACGCTCTTCCGATCTNNNNTCCATACCAGCAGCAGTTCC |
| rev_VEGFA_site2_off_target_3_human | TGGAGTTCAGACGTGTGCTCTTCCGATCTCTCACCTCAGCTCCTGCAC |
| fwd_VEGFA_site2_off_target_4_human | ACACTCTTTCCCTACACGACGCTCTTCCGATCTNNNNCCCACTGATTCTACACCATGGT |
| rev_VEGFA_site2_off_target_4_human | TGGAGTTCAGACGTGTGCTCTTCCGATCTGGAGTTCCCAACCTTTTTGACA |

Other primers (for off target sites associated with HEK_3, EMX1, FANCF) were previously published
Primers used to amplify off target genomic DNA for HTS in murine cells (SEQ ID NOS: 514-521)

| | |
|---|---|
| fwd_VEGFA_site2_off_target_1_murine | ACACTCTTTCCCTACACGACGCTCTTCCGATCTNNNNCTGGCTGGAGATTCAGAGACAC |
| rev_VEGFA_site2_off_target_1_murine | TGGAGTTCAGACGTGTGCTCTTCCGATCTCTGCCCCTTCTGACACACATAC |
| fwd_VEGFA_site2_off_target_2_murine | ACACTCTTTCCCTACACGACGCTCTTCCGATCTNNNNACCCCTCAAGGCTTGACATTTC |
| rev_VEGFA_site2_off_target_2_murine | TGGAGTTCAGACGTGTGCTCTTCCGATCTTGAAAAGTTGGGAGAGGGGATG |
| fwd_VEGFA_site2_off_target_3_murine | ACACTCTTTCCCTACACGACGCTCTTCCGATCTNNNNTTTGTACCCCAGTCCCCTCATC |
| rev_VEGFA_site2_off_target_3_murine | TGGAGTTCAGACGTGTGCTCTTCCGATCTTGAAGTTACGGGGATGTCACTTG |
| fwd_VEGFA_site2_off_target_4_murine | ACACTCTTTCCCTACACGACGCTCTTCCGATCTNNNNTTAACATCCAGTCTCCCAAACACA |
| rev_VEGFA_site2_off_target_4_murine | TGGAGTTCAGACGTGTGCTCTTCCGATCTACACACACACACTACTAGGACA |

Primers used to amplify on target genomic DNA for HTS in murine cells (SEQ ID NOS: 522-523)

| | |
|---|---|
| fwd_VEGFA_site2_on_target_murine | ACACTCTTTCCCTACACGACGCTCTTCCGATCTNNNNCGCTACTACGGAGCGAGAAG |
| rev_VEGFA_site2_on_target_murine | TGGAGTTCAGACGTGTGCTCTTCCGATCTACAGGGGCAAAGTGAGTGAC |

Primers used for generating PCR products to serve as substrates for T7 transcription of sgRNAs
(SEQ ID NOS: 524-529)

| | |
|---|---|
| rev_sgRNA_T7: used in all cases | AAAAAAAGCACCGACTCGGTGCCAC |
| fwd_sgRNA_T7_EMX1 | TAATACGACTCACTATAGGGAGTCCGAGCAGAAGAAGAAGTTTTAGAGCTAGAAATAGCA |
| fwd_sgRNA_T7_FANCF | TAATACGACTCACTATAGGGGAATCCCTTCTGCAGCACCGTTTTAGAGCTAGAAATAGCA |
| fwd_sgRNA_T7_HEK_site_3 | TAATACGACTCACTATAGGGGCCCAGACTGAGCACGTGAGTTTTAGAGCTAGAAATAGCA |
| fwd_sgRNA_T7_VEGFA_site_2 | TAATACGACTCACTATAG GACCCCCTCCACCCCGCCTCGTTTTAGAGCTAGAAATAGCA |
| fwd_sgRNA_T7_TC_repeat_in_vitro | TAATACGACTCACTATAGGTCTCTCTCTCTCTCTCTCTCGTTTTAGAGCTAGAAATAGCA |

Primers used for generating sgRNA transfection glasmids (SEQ ID NOS: 530-531)
The pFYF1320 plasmid was used as template as previously described (Komor et al). The sequence
of other sgRNA plasmids was previously reported

| | |
|---|---|
| rev_sgRNA_plasmid | GGTGTTTCGTCCTTTCCACAAG |
| fwd_VEGFA_site_2 | GACCCCCTCCACCCCGCCTCGTTTTAGAGCTAGAAATAGCAAGTTAAAATAAGGC |

Sequences of ssDNA substrates used in in vitro deaminase assays (SEQ ID NOS: 532-533)

| | |
|---|---|
| fwd_TC_repeat_substrate | ACGTAAACGGCCACAAGTTCGCGGCGATCGTCTCTCTCTCTCTCTCTCTCTGGATCGCCTGGCATCT |
| | TCTTCAAGGACG |
| rev_TC_repeat_substrate | CGTCCTTGAAGAAGATGCCAGGCGATCCAGAGAGAGAGAGAGAGAGAGACGATCGCCGCGAACTTGT |
| | GGCCGTTTACGT |

Previously published primers used to amplify off target genomic DNA for HTS in human cells
(SEQ ID NOS: 534-557)

| | |
|---|---|
| fwd_EMX1_HTS | ACACTCTTTCCCTACACGACGCTCTTCCGATCTNNNNCAGCTCAGCCTGAGTGTTGA |
| rev_EMX1_HTS | TGGAGTTCAGACGTGTGCTCTTCCGATCTCTCGTGGGTTTGTGGTTGC |
| fwd_FANCF_HTS | ACACTCTTTCCCTACACGACGCTCTTCCGATCTNNNNCATTGCAGAGAGGCGTATCA |
| rev_FANCF_HTS | TGGAGTTCAGACGTGTGCTCTTCCGATCTGGGGTCCCAGGTGCTGAC |
| fwd_HEK293_site3_HTS | ACACTCTTTCCCTACACGACGCTCTTCCGATCTNNNNATGTGGGCTGCCTAGAAAGG |
| rev_HEK293_site3_HTS | TGGAGTTCAGACGTGTGCTCTTCCGATCTCCCAGCCAAACTTGTCAACC |
| fwd_EMX1_off1_HTS | ACACTCTTTCCCTACACGACGCTCTTCCGATCTNNNNAGTAGCCTCTTTCTCAATGTGC |
| rev_EMX1_off1_HTS | TGGAGTTCAGACGTGTGCTCTTCCGATCTGCTTTCACAAGGATGCAGTCT |
| fwd_EMX1_off2_HTS | ACACTCTTTCCCTACACGACGCTCTTCCGATCTNNNNGAGCTAGACTCCGAGGGGA |
| rev_EMX1_off2_HTS | TGGAGTTCAGACGTGTGCTCTTCCGATCTTCCTCGTCCTGCTCTCACTT |
| fwd_EMX1_off3_HTS | ACACTCTTTCCCTACACGACGCTCTTCCGATCTNNNNAGAGGCTGAAGAGGAAGACCA |
| rev_EMX1_off3_HTS | TGGAGTTCAGACGTGTGCTCTTCCGATCTGGCCCAGCTGTGCATTCTAT |
| fwd_FANCF_off1_HTS | ACACTCTTTCCCTACACGACGCTCTTCCGATCTNNNNAACCCACTGAAGAAGCAGGG |
| rev_FANCF_off1_HTS | TGGAGTTCAGACGTGTGCTCTTCCGATCTGGTGCTTAATCCGGCTCCAT |
| fwd_FANCF_off2_HTS | ACACTCTTTCCCTACACGACGCTCTTCCGATCTNNNNTCCAGTGTTTCCATCCCGAA |
| rev_FANCF_off2_HTS | TGGAGTTCAGACGTGTGCTCTTCCGATCTCCTCTGACCTCCACAACTCT |
| fwd_FANCF_off3_HTS | ACACTCTTTCCCTACACGACGCTCTTCCGATCTNNNNCTGGGTACAGTTCTGCGTGT |
| rev_FANCF_off3_HTS | TGGAGTTCAGACGTGTGCTCTTCCGATCTTCACTCTGAGCATCGCCAAG |
| fwd_HEK293_site3_off1_HTS | ACACTCTTTCCCTACACGACGCTCTTCCGATCTNNNNTCCCCTGTTGACCTGGAGAA |
| rev_HEK293_site3_off1_HTS | TGGAGTTCAGACGTGTGCTCTTCCGATCTCACTGTACTTGCCCTGACCA |
| fwd_HEK293_site3_off2_HTS | ACACTCTTTCCCTACACGACGCTCTTCCGATCTNNNNTTGGTGTTGACAGGGAGCAA |
| rev_HEK293_site3_off2_HTS | TGGAGTTCAGACGTGTGCTCTTCCGATCTCTGAGATGTGGGCAGAAGGG |
| fwd_HEK293_site3_off3_HTS | ACACTCTTTCCCTACACGACGCTCTTCCGATCTNNNNTGAGAGGGAACAGAAGGGCT |
| rev_HEK293_site3_off3_HTS | TGGAGTTCAGACGTGTGCTCTTCCGATCTGTCCAAAGGCCCAAGAACCT |

Primers used to amplify on target genomic DNA for HTS in zebrafish (SEQ ID NOS: 558-563)

| | |
|---|---|
| fwd_TYR1_zebrafish | ACACTCTTTCCCTACACGACGCTCTTCCGATCTNNNNGTTCCCCCGAGTCTGCACCT |
| rev_TYR1_zebrafish | TGGAGTTCAGACGTGTGCTCTTCCGATCTCGAACTTGCATTCGCCGCAA |
| fwd_TYR2_zebrafish | ACACTCTTTCCCTACACGACGCTCTTCCGATCTNNNNTTCTGCCTTGGCATCGGGTG |
| rev_TYR2_zebrafish | TGGAGTTCAGACGTGTGCTCTTCCGATCTCACCATACCGCCCCTAGAACTAACATTC |
| fwd_TYR3_zebrafish | ACACTCTTTCCCTACACGACGCTCTTCCGATCTNNNNACAACTGCTTTCCATGGTGTGT |
| rev_TYR3_zebrafish | TGGAGTTCAGACGTGTGCTCTTCCGATCTTCCCAGGGCTTTCGTGGAGA |

| Site | Sequence | SEQ ID NO |
|---|---|---|
| TYR1 | GTC₃AGGTC₈GAGGGTTCTGTCAGG | 564 |
| TYR2 | CTTC₄C₅AGGATGAGAACACAGAGG | 565 |
| TYR3 | CAAC₄C₅AC₇TGCTCAAAGATGCTGG | 566 |

Supplementary Table 1. Protospacer and PAM sequences for the zebrafish genomic loci studied in this work.

### Example 17: C:G-to-T:A Base Editors with Higher Efficiency and Product Purity

[0820] Base editing is the programmable conversion of target C:G base pairs to T:A base pairs without inducing double-stranded DNA breaks or requiring homology-directed repair using engineered fusions of Cas9 variants and cytidine deaminases (1). The third-generation base editor (BE3) and related technologies have been successfully used by many researchers in a wide range of organisms (2-13). The product distribution of base editing—the frequency with which the target C:G base pair is converted to mixtures of undesired byproducts, along with the desired T:A product—varies in a target site-dependent manner (2, 3, 6-8). Here we characterize determinants of base editing outcomes in human cells, and establish that the formation of undesired products is dependent on uracil N-glycosylase (UNG), and is more likely to occur at target sites containing only a single C within the base editing activity window. The constructs CDA1-BE3 and AID-BE3, which use cytidine deaminase homologs that increase base editing efficiency for some sequences, were engineered. Additionally, a fourth-generation S. pyogenes Cas9-derived base editor (BE4) that more efficiently blocks access of UNG to base-edited intermediates was also engineered. Compared with BE3, BE4 increases by approximately 50% the efficiency of C:G to T:A base editing, while halving the frequency of undesired byproducts. These improvements were also applied to yield a S. aureus Cas9-derived BE4 (SaBE4), which is substantially smaller than BE4 and has an alternative targeting scope.

### Introduction

[0821] Traditional genome editing methods introduce a double-stranded DNA break (DSB) at a genomic target locus (14). The cellular response to a DSB lesion primarily proceeds through nonhomologous end joining (NHEJ) and related processes (15). Although NHEJ usually rejoins the two ends flanking the DSB, under typical genome editing conditions DSBs are continuously reintroduced, eventually resulting in the accumulation of insertions and deletions (indels) or translocations at the site of the DSB and disruption of the corresponding genomic locus (16). Actively dividing cells can also respond to DSBs by initiating homology-directed repair (HDR) in the presence of a donor DNA template containing homology to the regions surrounding the DSB, which allows researchers to more precisely and predictably manipulate genomes than is possible through NHEJ (17). HDR-dependent genome editing is limited by low efficiency arising from competition with NHEJ outcomes, and from the dependence of HDR on mitosis (18).

[0822] The development of base editing, which enables the direct, irreversible conversion of a C:G base pair to a T:A base pair in a programmable manner without requiring HDR or the introduction of a DSB, has been reported (1). Base editors consist of a single-stranded DNA-specific cytidine deaminase enzyme tethered to a catalytically impaired Cas9 protein and a base excision repair inhibitor (1, 4, 9, 10). The Cas9 variant binds a genomic locus of interest, programmed by a corresponding guide RNA. Formation of the protein:RNA:DNA ternary “R-loop” complex (19) exposes a small (˜5-nt) window of single-stranded DNA that serves as a substrate for the tethered cytidine deaminase enzyme. Any cytidines within this window are hydrolytically deaminated to uracils, resulting in G:U intermediates.

[0823] Base excision repair (BER) is the cell's primary response to G:U mismatches and is initiated by excision of the uracil by uracil N-glycosylase (UNG)(20). In an effort to protect the edited G:U intermediate from excision by UNG, an 83-amino acid uracil glycosylase inhibitor (UGI) was fused directly to the C-terminus of catalytically dead Cas9 (dCas9) (1). To manipulate cellular DNA mismatch repair systems into preferentially replacing the G in the G:U mismatch with an A, the Ala 840 amino acid in dCas9 was reverted to His, enabling the Cas9 protein to nick the DNA strand opposite the newly formed uracil, resulting in much more efficient conversion of the G:U intermediate to desired A:U and A:T products (1). Combining these two engineering efforts resulted in BE3, a single protein consisting of a three-part fusion of the APOBEC1 cytidine deaminase enzyme tethered through a 16-amino acid linker to S. pyogenes dCas9(A840H), which is covalently linked to UGI through a 4-amino acid linker(1). BE3 and related base editors have now been employed for a wide variety of applications including plant genome editing, in vivo mammalian genome editing, targeted mutagenesis, and knockout studies (2-13). The scope of base editing has been recenelty expanded by reporting BE3 variants with altered PAM requirements (4), narrowed editing windows (4), reduced off-target editing (10), and small molecule dependence (21).

[0824] At some loci, base editors such as BE3 give rise to undesired byproducts in which the target C:G base pair is converted into a G:C or A:T base pair, rather than the desired T:A product (2, 3, 6-8). Here we illuminate determinants of base editing product purity, and establish that UNG activity is required for the formation of undesired byproducts. It has been determined that blocking UNG access to the uracil intermediate is especially crucial for target loci in which a single C is within the editing window in order to minimize undesired products. Fourth-generation base editors, BE4 and SaBE4, that perform base editing with higher efficiency and greatly improved product purity compared to previously described base editors including BE3 were engineered.

### Results

### UNG Activity is Required for Byproduct Formation

[0825] Undesired base editing byproducts may arise during base excision repair due to the formation and error-prone resolution of abasic sites within the uracil-containing DNA strand. To determine if the product purity of base editing in cells lacking uracile N-glycosylase (UNG) improves, HAP1 cells (a haploid human cell line) and HAP1 UNG⁻ cells were nucelofected with plasmids encoding BE3 and sgRNAs targeting the EMX1, FANCF, HEK2, HEK3, HEK4, or RNF2 loci (see FIG. 135B for target sequences). Three days post-nucleofection, genomic DNA was extracted and the target loci were amplified by PCR and analyzed by high-throughput DNA sequencing (HTS). Base editing product purity is defined as the percent of edited sequencing reads (reads in which the target C has been converted to A, G, or T) in which the target C is edited to a T. The base editing product purity of BE3-treated HAP1 cells averaged 68±6% (mean±S.D. for n=3 biological replicates) across 12 target Cs in the six loci. In HAP1 UNG⁻ cells, all 12 target Cs tested were base edited with product purities >98% (FIG. 135A). In addition, indel frequencies at all six tested loci decreased 7- to 100-fold upon UNG knockout (FIG. 135C). These data strongly implicate UNG activity as necessary for undesired product formation during base editing, consistent with a model in which abasic site formation and subsequent base excision repair with error-prone polymerases leads to randomization of the target nucleotide and occasional strand breaks that result in indels.

Targets with Multiple Editable Cs Exhibit Higher Product Purity

[0826] Base editing efficiency by BE3 can be lower for some (but not all) target Cs that are immediately downstream of a G (1), consistent with the known sequence preference of APOBEC1 (22) (FIG. 136A). In an effort to efficiently edit such targets, BE3 variants in which replaced the APOBEC1 deaminase was replaced with CDA1 (to generate CDA1-BE3), AID (to generate AID-BE3), or APOBEC3G (to generate APOBEC3G-BE3), three single-stranded DNA-specific cytidine deaminase enzymes with different sequence preferences, were generated (23). HEK293T cells were transfected with plasmids encoding these BE3 variants and sgRNAs targeting the EMX1, FANCF, HEK2, HEK3, HEK4, or RNF2 loci. Three days post-transfection, genomic DNA was extracted and the target loci were amplified by PCR and assessed for base editing using HTS. More efficient editing of target Cs that immediately follow a G was observed with CDA1-BE3 and AID-BE3 compared to BE3 (FIG. 136A, FIGS. 140A-D, and FIGS. 146-151). In general, CDA1-BE3 and AID-BE3 exhibited lower editing efficiencies than BE3 at target Cs that do not follow a G (FIGS. 140A-D). In contrast, APOBEC3G-BE3 exhibited unpredictable sequence preferences, with overall lower yields of C-to-T editing compared to BE3. These findings suggest that CDA1-BE3 and AID-BE3 may offer higher editing efficiencies over BE3 for some target 5′-GC-3′ sequences.

[0827] While analyzing these data, it was noted that the product purities of CDA1-BE3 and AID-BE3 were typically higher than those of BE3 at those sites for which CDA1-BE3 and AID-BE3 edited more Cs than BE3 (FIGS. 136A-D). For example, at the HEK4 locus, BE3 edits only a single C efficiently (the C not preceded by a G) but both CDA1-BE3 and AID-BE3 edit three Cs (FIGS. 140A-C). The product purity of BE3 at this locus is 50±7% (mean±S.D. for n=3 biological replicates), while the product purity of CDA1-BE3 and AID-BE3 are 97±2% and 93±2%, respectively. Moreover, EMX1 and FANCF, edited by BE3 with product purities of 84±3% and 91±2%, respectively, contain multiple Cs that are edited with comparable efficiency (Figure S2), while HEK2 and RNF2, edited by BE3 with much lower product purities of 28±3% and 64±3%, respectively, contain multiple Cs that are edited with unequal efficiencies (FIGS. 141A-C). CDA1-BE3 and AID-BE3, which edit both Cs within the HEK2 locus with comparable efficiencies, exhibit much higher product purities at this locus (85±5% and 81±4%, respectively) (FIGS. 136A-D and FIG. 140C). The possibility that at the HEK2 and RNF2 sites the multiple Cs are initially converted to Us by BE3 with comparable efficiency and then processed with different efficiencies by DNA repair systems was ruled out. Given this, similar product distributions would be expected when these sites were treated with BE3 versus CDA1-BE3 or AID-BE3, rather than the different product distributions observed (FIG. 136B and FIGS. 146-151). Instead, an isolated G:U may be more readily processed by UNG than clusters of G:U lesions. It is possible that the processivity of the cytidine deaminase domain in BE3 (1, 24) may increase the residence time of BE3 at loci containing multiple editable Cs, thereby blocking access by UNG more effectively than at loci containing a single editable C.

[0828] The relationship between product purity, the number of edited Cs in individual sequencing reads, and UNG activity was further analyzed. To reveal the fate of base edited DNA in the absence of explicit UNG inhibition, the UGI component of BE3 was removed to generate BE3B. HEK293T cells were transfected with plasmids encoding BE3 or BE3B and sgRNAs targeting the EMX1, FANCF, HEK2, HEK3, HEK4, or RNF2 loci. As expected given the role of UNG in diversifying base editing outcomes established above, the product purities at all target Cs greatly decreased in BE3B-treated DNA compared with BE3-treated DNA, with the fraction of editing products containing non-Ts increasing by an average of 1.8±0.4-fold (FIG. 142B).

[0829] Individual DNA sequencing reads from HEK293T cells treated with sgRNAs targeting the multi-C sites HEK2, HEK3, and RNF2 and either BE3 or BE3B were analyzed. For each site, the primary target C was designated as the nucleotide modified most efficiently. Across all three sites, an average of 80±10% of sequencing reads that contained an undesired C to non-T edit of the primary target C exhibited only that single base editing event (FIGS. 142A-D and FIG. 143). In contrast, across the same three multi-C sites, a much lower average of 32±4% of sequencing reads containing a clean C-to-T edit of the primary target C exhibited only that single clean base editing event (FIGS. 142A-D and FIG. 143). In addition, the distribution of products for BE3B-treated HEK4 DNA, a site that contains only one C within the editing window, roughly follows the ratio of 1:3:1 for A:G:T (FIG. 143D). These observations collectively indicate that when a single cytidine in a given target is converted to U in the absence of UGI, it is processed efficiently by UNG-initiated BER to give a mixture of products.

[0830] These data are consistent with a model in which clustered G:U mismatches are processed differently than isolated G:U mismatches, and are more likely to produce clean C-to-T edits. When only a single C-to-T editing event is desired, the above observations suggest that UNG inhibition is critical to minimize undesired byproducts. However, when performing targeted random mutagenesis using dCas9-deaminase fusions, such as with TAM(8) and CRISPR-X(2), the above observations suggest that target sites with only a single editable C will maximize product mixtures.

### Optimization of BE3 Architecture for Improved Product Purity

[0831] The UGI component of BE3 was replaced with a single-stranded DNA binding (SSB) protein to yield SSB-BE3, such that SSB may block the uracil-containing ssDNA portion of the R-loop from being accessed by UNG. Large decreases in base editing efficiency by SSB-BE3 were observed, with all seven Cs across the four sites exhibiting an average of only 1.9±0.5% C-to-T conversion (FIG. 137C).

[0832] Since the relative positioning of APOBEC, UGI, and UNG during steps that determine base editing outcomes are not known, UGI was relocated to the N-terminus of BE3 (N-UGI-BE3) in an effort to improve UNG inhibition. Moving UGI to the N-terminus of BE3 resulted in an average decrease in C-to-T editing percentages across all seven tested target Cs of 2.3±0.6-fold compared to BE3 (FIG. 137C), and a decrease in overall product purity at all four sites compared to BE3 averaging 2.2±0.5-fold (FIG. 137B).

[0833] In contrast, appending an additional copy of UGI to the C-terminus of BE3 (BE3-2×UGI) resulted in large increases in product purities relative to BE3 and C-to-T editing percentages comparable to those of BE3. Non-T editing products decreased an average of 2.2±0.8-fold across the four loci tested (FIG. 137B). These observations suggest that addition of a second copy of UGI substantially decreases the access of UNG to the G:U base editing intermediate, thereby greatly improving product purity.

[0834] Because the above experiments also revealed the sensitivity of base editing outcomes to the architecture of the components, next we optimized the linkers between BE3 components to further increase product purities and editing efficiencies. We varied the rAPOBEC1-dCas9(A840H) linker from 16 amino acids (BE3) to 32 amino acids (BE3C) and the dCas9(A840H)-UGI linker from 4 (BE3) to 9 (BE3D) to 16 amino acids (BE3E, FIG. 138A). Non-T product formation on average decreased 1.3±0.1-fold when the dCas9(A840H)-UGI linker was nine amino acid residues in length (BE3D) instead of four amino acids (BE3) (FIG. 138D), with no apparent differences in C-to-T editing efficiencies (FIG. 138C). Increasing the rAPOBEC1-dCas9(A840H) linker from 16 amino acids (BE3) to 32 amino acids (BE3C) elevated C-to-T editing efficiencies an average of 1.2±0.1-fold at the HEK2 locus (FIG. 138C). This locus was previously the most unevenly edited multi-C site tested (FIGS. 141A-C), and extending this linker led to a reduction in preferential editing of C6 over C4 (the ratio of the percentage of sequencing reads that are edited at C6 to that of C4) from 2.6±0.2-fold to 1.8±0.1-fold. We reasoned that this longer linker may allow the deaminase better access to the ssDNA in the R-loop and result in more uniform deamination when multiple target Cs are present in the base editing window. BE3C also exhibited comparable or improved base editing efficiencies and product purities at the other loci tested (FIGS. 138C-D).

BE4, a C:G to T:A Base Editor with Enhanced Efficiency and Product Purity

[0835] The base editor construct BE4 was engineered by combining all three improvements—extending the rAPOBEC1-dCas9 linker to 32 amino acids, extending the dCas9-UGI linker to 9 amino acids, and appending a second copy of UGI to the C-terminus of the construct with another 9-amino acid linker. Target-AID, an alternative base editor construct reported by Nishida et. al. (9), was also cloned into the same plasmid backbone as BE4. HEK293T cells were transfected with plasmids encoding BE3, BE4, or Target-AID and sgRNAs targeting the EMX1, FANCF, HEK2, HEK3, HEK4, or RNF2 loci. Three days post transfection, genomic DNA was extracted and the target loci were amplified by PCR and analyzed by HTS. An average increase in C-to-T editing efficiencies of 1.5±0.3-fold across all twelve edited Cs for BE4 relative to BE3 was observed (FIG. 139C). Although the average efficiency of C-to-T editing for Target-AID at the same positions analyzed was 1.5±0.5-fold lower than that of BE3 and 2.1±0.5-fold lower than that of BE4, it is important to note that Target-AID, which uses the CDA1 deaminase, appears to have an editing window shifted relative to BE3 and BE4, with optimal editing around positions C3 and C4 (FIG. 139C). This shifted editing window makes comparisons of efficiency and product purity between Target-AID and BE3 or BE4 difficult because a given target C could lie in more optimal or less optimal position within the different editing windows, even when using the same guide RNA.

[0836] In addition to greater C-to-T editing efficiency, BE4 also exhibited substantially improved product purities relative to BE3 at all genomic loci tested, with an average decrease in non-T product formation of 2.3±0.3-fold (FIG. 139D). As expected from further impeding base excision repair, which can lead to indels (25), decreases in indel rates averaging 2.3±1.1-fold across all six loci following BE4 treatment compared to BE3 were also observed (FIGS. 144A-C). Taken together, these results indicate that BE4 offers high efficiencies of C-to-T editing, high product purities, and low indel formation rates at all loci tested.

[0837] The BE4 improvements were integrated with S. aureus Cas9 (26) to generate SaBE4, which replaces the S. pyogenes dCas9(A840H) with the smaller S. aureus dCas9(A580N) and can access different targets due to its alternative PAM requirements. HEK293T cells were transfected with plasmids encoding SaBE3 (4) or SaBE4 and sgRNAs targeting the FANCF, HEK3, or HEK4 loci. Consistent with the results comparing BE4 and BE3, we observed an average increase in C-to-T editing efficiencies of 1.4±0.2-fold across all ten edited Cs for SaBE4 relative to SaBE3 (FIG. 145A), with a 1.8±0.5-fold average decrease in undesired non-T editing products (FIG. 145B). These results indicate that the gains in base editing efficiency and product purity that arise from the BE4 enhancements also apply to base editors derived from other Cas9 homologs.

### Materials and Methods

### Cloning of Plasmids

[0838] All plasmids in this study were generated by USER cloning using Phusion U Hot Start polymerase (Thermo Fisher). Deaminase and SSB genes were synthesized as gBlocks Gene Fragments (Integrated DNA Technologies), and Target-AID was obtained from Addgene (plasmid #79620). Protein sequences are listed in the Supplementary Notes.

### Cell Culture

[0839] HEK293T (ATCC CRL-3216) cells were maintained in Dulbecco's Modified Eagle's Medium plus GlutaMax (ThermoFisher) supplemented with 10% (v/v) fetal bovine serum (FBS), at 37° C. with 5% CO₂. HAP1 (Horizon Discovery C631) and HAP1 UNG⁻ (Horizon Discovery HZGHC001531c012) were maintained in Iscove's Modified Dulbecco's Medium plus GlutaMax (ThermoFisher Scientific) supplemented with 10% (v/v) fetal bovine serum (FBS), at 37° C. with 5% CO₂.

### Transfections

[0840] HEK293T cells were seeded on 48-well collagen-coated BioCoat plates (Corning) and transfected at approximately 75% confluency. Briefly, 750 ng of BE and 250 ng of sgRNA expression plasmids were transfected using 1.5 μL of Lipofectamine 2000 (ThermoFisher Scientific) per well according to the manufacturer's protocol.

[0841] HAP1 and HAP1 UNG⁻ cells were nucleofected using the SE Cell Line 4DNucleofector™ X Kit S (Lonza) according to the manufacturer's protocol. Briefly, 4×10⁵ cells were nucleofected with 300 ng of BE and 100 ng of sgRNA expression plasmids using the 4DNucleofector™ program DZ-113.

### High-Throughput DNA Sequencing of Genomic DNA Samples

[0842] Transfected cells were harvested after 3 days and the genomic DNA was isolated by incubating cells in lysis buffer (10 mM Tris-HCl pH 8.0, 0.05% SDS, 25 μg/mL proteinase K) at 37° C. for 1 hr followed by 80° C. for 30 min. Genomic regions of interest were amplified by PCR with flanking HTS primer pairs as previously described (6, 1). PCR amplification was carried out with Phusion high-fidelity DNA polymerase (ThermoFisher) according to the manufacturer's instructions and as previously described. Purified DNA was amplified by PCR with primers containing sequencing adaptors. The products were gel-purified and quantified using the QuantiT™ PicoGreen dsDNA Assay Kit (ThermoFisher) and KAPA Library Quantification Kit-Illumina (KAPA Biosystems). Samples were sequenced on an Illumina MiSeq as previously described.

### Data Analysis

[0843] Sequencing reads were automatically demultiplexed using MiSeq Reporter (Illumina), and individual FASTQ files were analyzed with a custom Matlab script as previously described (1). Each read was pairwise aligned to the appropriate reference sequence using the Smith-Waterman algorithm. Base calls with a Q-score below 31 were replaced with Ns and were thus excluded in calculating nucleotide frequencies. This treatment yields an expected MiSeq base-calling error rate of approximately 1 in 1,000. Aligned sequences in which the read and reference sequence contained no gaps were stored in an alignment table from which base frequencies could be tabulated for each locus.

[0844] Indel frequencies were quantified with the previously described Matlab script (5, 6, 1). Briefly, sequencing reads were scanned for exact matches to two 10-bp sequences that flank both sides of a window in which indels might occur. If no exact matches were located, the read was excluded from analysis. If the length of this indel window exactly matched the reference sequence the read was classified as not containing an indel. If the indel window was two or more bases longer or shorter than the reference sequence, then the sequencing read was classified as an insertion or deletion, respectively.

[0845] In order to evaluate interdependency (linkage disequilibrium) between the base editing outcomes at the multiple target cytidines within an editing window, target site sequences from BE treated cells were analyzed by a custom Python script (Supplementary Note 1). Briefly, sequencing reads were scanned for exact matches to two 7-bp sequences that flank each side of the protospacer. If the intervening region was not exactly 20-bp, then it was excluded further analysis. The protospacer sequences were further filtered into four groups based upon the identity of the nucleotide at the position with the most non-T editing outcomes (the primary target C). For each of these four groups as well as the entire pool, the nucleotide abundance at each of the 20 positions within the protospacer were tallied.

### Example 18: Base Editors Comprising an LbCpf1 (Nuclease Dead, Nuclease Active, and Nickase)

[0846] As discussed above, nucleic acid programmable DNA binding proteins (napDNAbp) of any of the fusion proteins provided herein may be an LbCpf1 protein. In some embodiments, the LbCpf1 protein is nuclease inactive, nuclease active, or an LbCpf1 nickase. Several constructs of fusion proteins comprising forms of LbCpf1 were tested for their ability to make C to T edits in different target sequences. A schematic representation of the constructs tested is shown in FIG. 152. Construct 10 has a domain arrangement of [Apobec]-[LbCpf1]-[UGI]-[UGI]; construct 11 has a domain arrangement of [Apobec]-[LbCpf1]-[UGI]; construct 12 has a domain arrangement of [UGI]-[Apobec]-[LbCpf1]; construct 13 has a domain arrangement of [Apobec]-[UGI]-[LbCpf1]; construct 14 has a domain arrangement of [LbCpf1]-[UGI]-[Apobec]; construct 15 has a domain arrangement of [LbCpf1]-[Apobec]-[UGI]. For each construct three different LbCpf1 proteins were used (D/N/A, which refers to nuclease dead LbCpf1 (D); LbCpf1 nickase (N) and nuclease active LbCpf1 (A)). For each of these constructs, the linkers linking the domains are shown below, where XTEN refers to the XTEN linker having the sequence SGSETPGTSESATPES (SEQ ID NO: 604), and BPNLS refers to the nuclear localization sequence having the sequence KRTADGSEFEPKKKRKV (SEQ ID NO: 740). Constructs are shown from N-terminus (left) to C-terminus (right).

Construct 10: Apobec-SGGSSGGSXTENSGGSSGGS-LbCpf1-
SGGSGGSGGS-UGI-SGGSGGSGGS-UGI-SGGS-BPNLS
Construct 11: Apobec-SGGSSGGSXTENSGGSSGGS-LbCpf1-
SGGSGGSGGS-UGI-SGGS-BPNLS
Construct 12: UGI-SGGSGGSGGS-Apobec-
SGGSSGGSXTENSGGSSGGS-LbCpf1-SGGS-BPNLS
Construct 13: Apobec-SGGSGGSGGS-UGI-
SGGSSGGSXTENSGGSSGGS-LbCpf1-SGGS-BPNLS
Construct 14: LbCpf1-SGGSGGSGGS-UGI-SGGSGGSGGS-
Apobec-SGGS-BPNLS
Construct 15: LbCpf1-SGGSGGSGGS-Apobec-SGGSGGSGGS-
UGI-SGGS-BPNLS

[0847] The common guide backbone (sgRNA) used in the experiments is GTAATTTCTACTAAGTGTAGAT (SEQ ID NO: 741)[guide sequence]TTTTTTT, wherein each of the Ts of SEQ ID NO: 741 are uracil (U), and where the guide sequence that targets the construct to a specific nucleotide sequence is shown between brackts. In some embodiments, any of the constructs provided herein are complexed with a sgRNA that comprises the backbone sequence of GTAATTTCTACTAAGTGTAGAT (SEQ ID NO: 741), wherein each of the Ts of SEQ ID NO: 741 are uracil (U). In some embodiments, any of the guide RNAs provided herein comprise a guide sequence comprising 14, 15, 16, 17, 18, 19, 20, 21, 22, 23, 24, 25, 26, 27, 28, 29, or 30 nucleotides that are perfectly complementary to a sequence, e.g., a target DNA sequence. In the experiments performed, the guide sequences tested are shown below:

EMX23:

(SEQ ID NO: 742)

TACTTTGTCCTCCGGTTCTGGAA
EMX20:

(SEQ ID NO: 743)

TACTTTGTCCTCCGGTTCTG
EMX19:

(SEQ ID NO: 744)

TACTTTGTCCTCCGGTTCT
EMX18:

(SEQ ID NO: 745)

TACTTTGTCCTCCGGTTC
EMX17:

(SEQ ID NO: 746)

TACTTTGTCCTCCGGTT
Hek2_23:

(SEQ ID NO: 747)

CAGCCCGCTGGCCCTGTAAAGGA
Hek2_20:

(SEQ ID NO: 748)

CAGCCCGCTGGCCCTGTAAA
Hek2_19:

(SEQ ID NO: 749)

CAGCCCGCTGGCCCTGTAA
Hek2_18:

(SEQ ID NO: 750)

CAGCCCGCTGGCCCTGTA
Hek2_17:

(SEQ ID NO: 751)

CAGCCCGCTGGCCCTGT

[0848] The data demonstrating the C to T base pair editing percentage using various constructs and target sequences is shown in FIGS. 153-159, and the editing percentage values (after adjustment based on indel count), and the percentage of indels for the experiments are shown in FIGS. 160-166.

### Supplementary Sequences

[0849] Amino Acid Sequences of CDA1-BE3, AID-BE3, BE4, and SaBE4 fusion proteins. CDA1-XTEN-dCas9-UGI-NLS primary sequence (CDA1-BE3):

(SEQ ID NO: 165)

MTDAEYVRIHEKLDIYTFKKQFFNNKKSVSHRCYVLFELKRRGERRACFW
GYAVNKPQSGTERGIHAEIFSIRKVEEYLRDNPGQFTINWYSSWSPCADC
AEKILEWYNQELRGNGHTLKIWACKLYYEKNARNQIGLWNLRDNGVGLNV
MVSEHYQCCRKIFIQSSHNQLNENRWLEKTLKRAEKRRSELSIMIQVKIL
HTTKSPAVSGSETPGTSESATPESDKKYSIGLAIGTNSVGWAVITDEYKV
PSKKFKVLGNTDRHSIKKNLIGALLFDSGETAEATRLKRTARRRYTRRKN
RICYLQEIFSNEMAKVDDSFFHRLEESFLVEEDKKHERHPIFGNIVDEVA
YHEKYPTIYHLRKKLVDSTDKADLRLIYLALAHMIKFRGHFLIEGDLNPD
NSDVDKLFIQLVQTYNQLFEENPINASGVDAKAILSARLSKSRRLENLIA
QLPGEKKNGLFGNLIALSLGLTPNFKSNFDLAEDAKLQLSKDTYDDDLDN
LLAQIGDQYADLFLAAKNLSDAILLSDILRVNTEITKAPLSASMIKRYDE
HHQDLTLLKALVRQQLPEKYKEIFFDQSKNGYAGYIDGGASQEEFYKFIK
PILEKMDGTEELLVKLNREDLLRKQRTFDNGSIPHQIHLGELHAILRRQE
DFYPFLKDNREKIEKILTFRIPYYVGPLARGNSRFAWMTRKSEETITPWN
FEEVVDKGASAQSFIERMTNFDKNLPNEKVLPKHSLLYEYFTVYNELTKV
KYVTEGMRKPAFLSGEQKKAIVDLLFKTNRKVTVKQLKEDYFKKIECFDS
VETSGVEDRFNASLGTYHDLLKIIKDKDFLDNEENEDILEDIVLTLTLFE
DREMIEERLKTYAHLFDDKVMKQLKRRRYTGWGRLSRKLINGIRDKQSGK
TILDFLKSDGFANRNFMQLIHDDSLTFKEDIQKAQVSGQGDSLHEHIANL
AGSPAIKKGILQTVKVVDELVKVMGRHKPENIVIEMARENQTTQKGQKNS
RERMKRIEEGIKELGSQILKEHPVENTQLQNEKLYLYYLQNGRDMYVDQE
LDINRLSDYDVDHIVPQSFLKDDSIDNKVLTRSDKNRGKSDNVPSEEVVK
KMKNYWRQLLNAKLITQRKFDNLTKAERGGLSELDKAGFIKRQLVETRQI
TKHVAQILDSRMNTKYDENDKLIREVKVITLKSKLVSDFRKDFQFYKVRE
INNYHHAHDAYLNAVVGTALIKKYPKLESEFVYGDYKVYDVRKMIAKSEQ
EIGKATAKYFFYSNIMNFFKTEITLANGEIRKRPLIETNGETGEIVWDKG
RDFATVRKVLSMPQVNIVKKTEVQTGGFSKESILPKRNSDKLIARKKDWD
PKKYGGFDSPTVAYSVLVVAKVEKGKSKKLKSVKELLGITIMERSSFEKN
PIDFLEAKGYKEVKKDLIIKLPKYSLFELENGRKRMLASAGELQKGNELA
LPSKYVNFLYLASHYEKLKGSPEDNEQKQLFVEQHKHYLDEIIEQISEFS
KRVILADANLDKVLSAYNKHRDKPIREQAENIIHLFTLTNLGAPAAFKYF
DTTIDRKRYTSTKEVLDATLIHQSITGLYETRIDLSQLGGDSGGSTNLSD
HEKETGKQLVIQESILMLPEEVEEVIGNKPESDILVHTAYDESTDENVML
LTSDAPEYKPWALVIQDSNGENKIKMLSGGSPKKKRKV

AID-XTEN-dCas9-UGI-NLS primary sequence (AID-BE3):

(SEQ ID NO: 166)

MDSLLMNRRKFLYQFKNVRWAKGRRETYLCYVVKRRDSATSFSLDFGYLR
NKNGCHVELLFLRYISDWDLDPGRCYRVTWFTSWSPCYDCARHVADFLRG
NPNLSLRIFTARLYFCEDRKAEPEGLRRLHRAGVQIAIMTFKDYFYCWNT
FVENHERTFKAWEGLHENSVRLSRQLRRILLPLYEVDDLRDAFRTLGLSG
SETPGTSESATPESDKKYSIGLAIGTNSVGWAVITDEYKVPSKKFKVLGN
TDRHSIKKNLIGALLFDSGETAEATRLKRTARRRYTRRKNRICYLQEIFS
NEMAKVDDSFFHRLEESFLVEEDKKHERHPIFGNIVDEVAYHEKYPTIYH
LRKKLVDSTDKADLRLIYLALAHMIKFRGHFLIEGDLNPDNSDVDKLFIQ
LVQTYNQLFEENPINASGVDAKAILSARLSKSRRLENLIAQLPGEKKNGL
FGNLIALSLGLTPNFKSNFDLAEDAKLQLSKDTYDDDLDNLLAQIGDQYA
DLFLAAKNLSDAILLSDILRVNTEITKAPLSASMIKRYDEHHQDLTLLKA
LVRQQLPEKYKEIFFDQSKNGYAGYIDGGASQEEFYKFIKPILEKMDGTE
ELLVKLNREDLLRKQRTFDNGSIPHQIHLGELHAILRRQEDFYPFLKDNR
EKIEKILTFRIPYYVGPLARGNSRFAWMTRKSEETITPWNFEEVVDKGAS
AQSFIERMTNFDKNLPNEKVLPKHSLLYEYFTVYNELTKVKYVTEGMRKP
AFLSGEQKKAIVDLLFKTNRKVTVKQLKEDYFKKIECFDSVETSGVEDRF
NASLGTYHDLLKIIKDKDFLDNEENEDILEDIVLTLTLFEDREMIEERLK
TYAHLFDDKVMKQLKRRRYTGWGRLSRKLINGIRDKQSGKTILDFLKSDG
FANRNFMQLIHDDSLTFKEDIQKAQVSGQGDSLHEHIANLAGSPAIKKGI
LQTVKVVDELVKVMGRHKPENIVIEMARENQTTQKGQKNSRERMKRIEEG
IKELGSQILKEHPVENTQLQNEKLYLYYLQNGRDMYVDQELDINRLSDYD
VDHIVPQSFLKDDSIDNKVLTRSDKNRGKSDNVPSEEVVKKMKNYWRQLL
NAKLITQRKFDNLTKAERGGLSELDKAGFIKRQLVETRQITKHVAQILDS
RMNTKYDENDKLIREVKVITLKSKLVSDFRKDFQFYKVREINNYHHAHDA
YLNAVVGTALIKKYPKLESEFVYGDYKVYDVRKMIAKSEQEIGKATAKYF
FYSNIMNFFKTEITLANGEIRKRPLIETNGETGEIVWDKGRDFATVRKVL
SMPQVNIVKKTEVQTGGFSKESILPKRNSDKLIARKKDWDPKKYGGFDSP
TVAYSVLVVAKVEKGKSKKLKSVKELLGITIMERSSFEKNPIDFLEAKGY
KEVKKDLIIKLPKYSLFELENGRKRMLASAGELQKGNELALPSKYVNFLY
LASHYEKLKGSPEDNEQKQLFVEQHKHYLDEIIEQISEFSKRVILADANL
DKVLSAYNKHRDKPIREQAENIIHLFTLTNLGAPAAFKYFDTTIDRKRYT
STKEVLDATLIHQSITGLYETRIDLSQLGGDSGGSTNLSDHEKETGKQLV
IQESILMLPEEVEEVIGNKPESDILVHTAYDESTDENVMLLTSDAPEYKP
WALVICIDSNGENKIKMLSGGSPKKKRKV

rAPOBEC1-linker-dCas9-UGI-UGI-NLS primary sequence (BE4):

(SEQ ID NO: 167)

MSSETGPVAVDPTLRRRIEPHEFEVFFDPRELRKETCLLYEINWGGRHSI
WRHTSQNTNKHVEVNFIEKFTTERYFCPNTRCSITWFLSWSPCGECSRAI
TEFLSRYPHVTLFIYIARLYHHADPRNRQGLRDLISSGVTIQIMTEQESG
YCWRNFVNYSPSNEAHWPRYPHLWVRLYVLELYCHLGLPPCLNILRRKQP
QLTFFTIALQSCHYQRLPPHILWATGLKSGGSSGGSSGSETPGTSESATP
ESSGGSSGGSDKKYSIGLAIGTNSVGWAVITDEYKVPSKKFKVLGNTDRH
SIKKNLIGALLFDSGETAEATRLKRTARRRYTRRKNRICYLQEIFSNEMA
KVDDSFFHRLEESFLVEEDKKHERHPIFGNIVDEVAYHEKYPTIYHLRKK
LVDSTDKADLRLIYLALAHMIKFRGHFLIEGDLNPDNSDVDKLFIQLVQT
YNQLFEENPINASGVDAKAILSARLSKSRRLENLIAQLPGEKKNGLFGNL
IALSLGLTPNFKSNFDLAEDAKLQLSKDTYDDDLDNLLAQIGDQYADLFL
AAKNLSDAILLSDILRVNTEITKAPLSASMIKRYDEHHQDLTLLKALVRQ
QLPEKYKEIFFDQSKNGYAGYIDGGASQEEFYKFIKPILEKMDGTEELLV
KLNREDLLRKQRTFDNGSIPHQIHLGELHAILRRQEDFYPFLKDNREKIE
KILTFRIPYYVGPLARGNSRFAWMTRKSEETITPWNFEEVVDKGASAQSF
IERMTNFDKNLPNEKVLPKHSLLYEYFTVYNELTKVKYVTEGMRKPAFLS
GEQKKAIVDLLFKTNRKVTVKQLKEDYFKKIECFDSVEISGVEDRFNASL
GTYHDLLKIIKDKDFLDNEENEDILEDIVLTLTLFEDREMIEERLKTYAH
LFDDKVMKQLKRRRYTGWGRLSRKLINGIRDKQSGKTILDFLKSDGFANR
NFMQLIHDDSLTFKEDIQKAQVSGQGDSLHEHIANLAGSPAIKKGILQTV
KVVDELVKVMGRHKPENIVIEMARENQTTQKGQKNSRERMKRIEEGIKEL
GSQILKEHPVENTQLQNEKLYLYYLQNGRDMYVDQELDINRLSDYDVDHI
VPQSFLKDDSIDNKVLTRSDKNRGKSDNVPSEEVVKKMKNYWRQLLNAKL
ITQRKFDNLTKAERGGLSELDKAGFIKRQLVETRQITKHVAQILDSRMNT
KYDENDKLIREVKVITLKSKLVSDFRKDFQFYKVREINNYHHAHDAYLNA
VVGTALIKKYPKLESEFVYGDYKVYDVRKMIAKSEQEIGKATAKYFFYSN
IMNFFKTEITLANGEIRKRPLIETNGETGEIVWDKGRDFATVRKVLSMPQ
VNIVKKTEVQTGGFSKESILPKRNSDKLIARKKDWDPKKYGGFDSPTVAY
SVLVVAKVEKGKSKKLKSVKELLGITIMERSSFEKNPIDFLEAKGYKEVK
KDLIIKLPKYSLFELENGRKRMLASAGELQKGNELALPSKYVNFLYLASH
YEKLKGSPEDNEQKQLFVEQHKHYLDEIIEQISEFSKRVILADANLDKVL
SAYNKHRDKPIREQAENIIHLFTLTNLGAPAAFKYFDTTIDRKRYTSTKE
VLDATLIHQSITGLYETRIDLSQLGGDSGGSGGSGGSTNLSDITEKETGK
QLVICIESILMLPEEVEEVIGNKPESDILVHTAYDESTDENVMLLTSDAP
EYKPWALVICIDSNGENKIKMLSGGSGGSGGS [symbol] [symbol] [symbol] [symbol] [symbol] [symbol] [symbol] SGGS
PKKKRK

rAPOBEC1-linker-SaCas9d-UGI-UGI-NLS primary sequence (SaBE4):

(SEQ ID NO: 168)

MSSETGPVAVDPTLRRRIEPHEFEVFFDPRELRKETCLLYEINWGGRHSI
WRHTSQNTNKHVEVNFIEKFTTERYFCPNTRCSITWFLSWSPCGECSRAI
TEFLSRYPHVTLFIYIARLYHHADPRNRQGLRDLISSGVTIQIMTEQESG
YCWRNFVNYSPSNEAHWPRYPHLWVRLYVLELYCHLGLPPCLNILRRKQP
QLTFFTIALQSCHYQRLPPHILWATGLKSGGSSGGSSGSETPGTSESATP
ESSGGSSGGSGKRNYILGLAIGITSVGYGIIDYETRDVIDAGVRLFKEAN
VENNEGRRSKRGARRLKRRRRHRIQRVKKLLFDYNLLTDHSELSGINPYE
ARVKGLSQKLSEEEFSAALLHLAKRRGVHNVNEVEEDTGNELSTKEQISR
NSKALEEKYVAELQLERLKKDGEVRGSINRFKTSDYVKEAKQLLKVQKAY
HQLDQSFIDTYIDLLETRRTYYEGPGEGSPFGWKDIKEWYEMLMGHCTYF
PEELRSVKYAYNADLYNALNDLNNLVITRDENEKLEYYEKFQIIENVFKQ
KKKPTLKQIAKEILVNEEDIKGYRVTSTGKPEFTNLKVYHDIKDITARKE
IIENAELLDQIAKILTIYQSSEDIQEELTNLNSELTQEEIEQISNLKGYT
GTHNLSLKAINLILDELWHTNDNQIAIFNRLKLVPKKVDLSQQKEIPTTL
VDDFILSPVVKRSFIQSIKVINAIIKKYGLPNDIIIELAREKNSKDAQKM
INEMQKRNRQTNERIEEIIRTTGKENAKYLIEKIKLHDMQEGKCLYSLEA
IPLEDLLNNPFNYEVDHIIPRSVSFDNSFNNKVLVKQEENSKKGNRTPFQ
YLSSSDSKISYETFKKHILNLAKGKGRISKTKKEYLLEERDINRFSVQKD
FINRNLVDTRYATRGLMNLLRSYFRVNNLDVKVKSINGGFTSFLRRKWKF
KKERNKGYKHHAEDALIIANADFIFKEWKKLDKAKKVMENQMFEEKQAES
MPEIETEQEYKEIFITPHQIKHIKDFKDYKYSHRVDKKPNRELINDTLYS
TRKDDKGNTLIVNNLNGLYDKDNDKLKKLINKSPEKLLMYHHDPQTYQKL
KLIMEQYGDEKNPLYKYYEETGNYLTKYSKKDNGPVIKKIKYYGNKLNAH
LDITDDYPNSRNKVVKLSLKPYRFDVYLDNGVYKFVTVKNLDVIKKENYY
EVNSKCYEEAKKLKKISNQAEFIASFYNNDLIKINGELYRVIGVNNDLLN
RIEVNMIDITYREYLENMNDKRPPRIIKTIASKTQSIKKYSTDILGNLYE
VKSKKHPQIIKKGGSPKKKRKVSSDYKDHDGDYKDHDIDYKDDDDKSGGS
GGSGGSTNLSDHEKETGKQLVIQESILMLPEEVEEVIGNKPESDILVHTA
YDESTDENVMLLTSDAPEYKPWALVICIDSNGENKIKMLSGGSGGSGGS [symbol] [symbol] [symbol] [symbol] [symbol] [symbol]
SGGSPKKKRKV

### REFERENCES FOR EXAMPLE 17

[0850] 1. A. C. Komor, Y. B. Kim, M. S. Packer, J. A. Zuris, D. R. Liu, Programmable editing of a target base in genomic DNA without double-stranded DNA cleavage. Nature 533, 420-424 (2016).
[0851] 2. G. T. Hess et al., Directed evolution using dCas9-targeted somatic hypermutation in mammalian cells. Nat Methods 13, 1036-1042 (2016).
[0852] 3. K. Kim et al., Highly efficient RNA-guided base editing in mouse embryos. Nat Biotechnol 35, 435-437 (2017).
[0853] 4. Y. B. Kim et al., Increasing the genome-targeting scope and precision of base editing with engineered Cas9-cytidine deaminase fusions. Nat Biotechnol 35, 371-376 (2017).
[0854] 5. C. Kuscu et al., CRISPR-STOP: gene silencing through base-editing-induced nonsense mutations. Nat Meth advance online publication, (2017).
[0855] 6. J. Li, Y. Sun, J. Du, Y. Zhao, L. Xia, Generation of Targeted Point Mutations in Rice by a Modified CRISPR/Cas9 System. Mol Plant 10, 526-529 (2017).
[0856] 7. Y. Lu, J. K. Zhu, Precise Editing of a Target Base in the Rice Genome Using a Modified CRISPR/Cas9 System. Mol Plant 10, 523-525 (2017).
[0857] 8. Y. Ma et al., Targeted AID-mediated mutagenesis (TAM) enables efficient genomic diversification in mammalian cells. Nat Methods 13, 1029-1035 (2016).
[0858] 9. K. Nishida et al., Targeted nucleotide editing using hybrid prokaryotic and vertebrate adaptive immune systems. Science 353, (2016).
[0859] 10. H. A. Rees et al., Improving the DNA specificity and applicability of base editing through protein engineering and protein delivery. Nat Commun 8, 15790 (2017).
[0860] 11. L. Yang et al., Engineering and optimising deaminase fusions for genome editing. Nat Commun 7, 13330 (2016).
[0861] 12. Y. Zong et al., Precise base editing in rice, wheat and maize with a Cas9-cytidine deaminase fusion. Nat Biotechnol 35, 438-440 (2017).
[0862] 13. Z. Shimatani et al., Targeted base editing in rice and tomato using a CRISPR-Cas9 cytidine deaminase fusion. Nat Biotech 35, 441-443 (2017).
[0863] 14. A. C. Komor, A. H. Badran, D. R. Liu, CRISPR-Based Technologies for the Manipulation of Eukaryotic Genomes. Cell 168, 20-36 (2017).
[0864] 15. A. J. Davis, D. J. Chen, DNA double strand break repair via non-homologous end-joining. Translational cancer research 2, 130-143 (2013).
[0865] 16. M. M. Vilenchik, A. G. Knudson, Endogenous DNA double-strand breaks: Production, fidelity of repair, and induction of cancer. Proceedings of the National Academy of Sciences 100, 12871-12876 (2003).
[0866] 17. F. Liang, M. Han, P. J. Romanienko, M. Jasin, Homology-directed repair is a major doublestrand break repair pathway in mammalian cells. Proceedings of the National Academy of Sciences 95, 5172-5177 (1998).
[0867] 18. Y. Miyaoka et al., Systematic quantification of HDR and NHEJ reveals effects of locus, nuclease, and cell type on genome-editing. Scientific Reports 6, 23549 (2016).
[0868] 19. M. M. Jore et al., Structural basis for CRISPR RNA-guided DNA recognition by Cascade. Nat Struct Mol Biol 18, 529-536 (2011).
[0869] 20. L. H. Pearl, Structure and function in the uracil-DNA glycosylase superfamily. Mutation Research/DNA Repair 460, 165-181 (2000).
[0870] 21. W. Tang, J. H. Hu, D. R. Liu, Aptazyme-embedded guide RNAs enable ligand-responsive genome editing and transcriptional activation. 8, 15939 (2017).
[0871] 22. G. Saraconi, F. Severi, C. Sala, G. Mattiuz, S. G. Conticello, The RNA editing enzyme APOBEC1 induces somatic mutations and a compatible mutational signature is present in esophageal adenocarcinomas. Genome Biology 15, 417 (2014).
[0872] 23. R. M. Kohli et al., Local Sequence Targeting in the AID/APOBEC Family Differentially Impacts Retroviral Restriction and Antibody Diversification. Journal of Biological Chemistry 285, 40956-40964 (2010).
[0873] 24. L. Chelico, P. Pham, M. F. Goodman, Stochastic properties of processive cytidine DNA deaminases AID and APOBEC3G. Philosophical Transactions of the Royal Society B: Biological Sciences 364, 583-593 (2009).
[0874] 25. E. A. Kouzminova, A. Kuzminov, Patterns of chromosomal fragmentation due to uracil-DNA incorporation reveal a novel mechanism of replication-dependent double-stranded breaks. Molecular Microbiology 68, 202-215 (2008).
[0875] 26. F. A. Ran et al., In vivo genome editing using Staphylococcus aureus Cas9. Nature 520, 186-191 (2015).
[0876] 27. F. d. A. di Fagagna, G. R. Weller, A. J. Doherty, S. P. Jackson, The Gam protein of bacteriophage Mu is an orthologue of eukaryotic Ku. EMBO Reports 4, 47-52 (2003).
[0877] 28. C. Shee et al., Engineered proteins detect spontaneous DNA breakage in human and bacterial cells. eLife 2, e01222 (2013).

### EQUIVALENTS AND SCOPE

[0878] Those skilled in the art will recognize, or be able to ascertain using no more than routine experimentation, many equivalents of the embodiments described herein. The scope of the present disclosure is not intended to be limited to the above description, but rather is as set forth in the appended claims.

[0879] Articles such as “a,” “an,” and “the” may mean one or more than one unless indicated to the contrary or otherwise evident from the context. Claims or descriptions that include “or” between two or more members of a group are considered satisfied if one, more than one, or all of the group members are present, unless indicated to the contrary or otherwise evident from the context. The disclosure of a group that includes “or” between two or more group members provides embodiments in which exactly one member of the group is present, embodiments in which more than one members of the group are present, and embodiments in which all of the group members are present. For purposes of brevity those embodiments have not been individually spelled out herein, but it will be understood that each of these embodiments is provided herein and may be specifically claimed or disclaimed.

[0880] It is to be understood that the invention encompasses all variations, combinations, and permutations in which one or more limitation, element, clause, or descriptive term, from one or more of the claims or from one or more relevant portion of the description, is introduced into another claim. For example, a claim that is dependent on another claim can be modified to include one or more of the limitations found in any other claim that is dependent on the same base claim. Furthermore, where the claims recite a composition, it is to be understood that methods of making or using the composition according to any of the methods of making or using disclosed herein or according to methods known in the art, if any, are included, unless otherwise indicated or unless it would be evident to one of ordinary skill in the art that a contradiction or inconsistency would arise.

[0881] Where elements are presented as lists, e.g., in Markush group format, it is to be understood that every possible subgroup of the elements is also disclosed, and that any element or subgroup of elements can be removed from the group. It is also noted that the term “comprising” is intended to be open and permits the inclusion of additional elements or steps. It should be understood that, in general, where an embodiment, product, or method is referred to as comprising particular elements, features, or steps, embodiments, products, or methods that consist, or consist essentially of, such elements, features, or steps, are provided as well. For purposes of brevity those embodiments have not been individually spelled out herein, but it will be understood that each of these embodiments is provided herein and may be specifically claimed or disclaimed.

[0882] Where ranges are given, endpoints are included. Furthermore, it is to be understood that unless otherwise indicated or otherwise evident from the context and/or the understanding of one of ordinary skill in the art, values that are expressed as ranges can assume any specific value within the stated ranges in some embodiments, to the tenth of the unit of the lower limit of the range, unless the context clearly dictates otherwise. For purposes of brevity, the values in each range have not been individually spelled out herein, but it will be understood that each of these values is provided herein and may be specifically claimed or disclaimed. It is also to be understood that unless otherwise indicated or otherwise evident from the context and/or the understanding of one of ordinary skill in the art, values expressed as ranges can assume any subrange within the given range, wherein the endpoints of the subrange are expressed to the same degree of accuracy as the tenth of the unit of the lower limit of the range.

In addition, it is to be understood that any particular embodiment of the present invention may be explicitly excluded from any one or more of the claims. Where ranges are given, any value within the range may explicitly be excluded from any one or more of the claims. Any embodiment, element, feature, application, or aspect of the compositions and/or methods of the invention, can be excluded from any one or more claims. For purposes of brevity, all of the embodiments in which one or more elements, features, purposes, or aspects is excluded are not set forth explicitly herein.

1. A fusion protein comprising: (i) a nucleic acid programmable DNA binding protein (napDNAbp); (ii) a cytidine deaminase domain; and (iii) a uracil glycosylase inhibitor (UGI) domain, wherein the napDNAbp is a CasX, CasY, Cpf1, C2c1, C2c2, C2c3, or Argonaute protein.

2. The fusion protein of claim 1, wherein the fusion protein comprises two UGI domains.

3-40. (canceled)

41. A complex comprising the fusion protein of claim 1, and a guide RNA bound to the napDNAbp of the fusion protein.

42. A method comprising contacting a nucleic acid molecule with the fusion protein of claim 1, wherein the guide RNA comprises a sequence of at least 10 contiguous nucleotides that is complementary to a target sequence in the genome of an organism and comprises a target base pair.

43-45. (canceled)

46. A complex comprising the fusion protein of claim 1, and an RNA bound to the napDNAbp.

47-66. (canceled)

67. A method comprising contacting a nucleic acid molecule with the complex of claim 46.

68-82. (canceled)

83. A kit comprising a nucleic acid construct, comprising
(a) a nucleic acid sequence encoding the fusion protein of claim 1; and
(b) a heterologous promoter that drives expression of the sequence of (a).

84. (canceled)

85. A polynucleotide encoding the fusion protein of claim 1.

86. A vector comprising a polynucleotide of claim 85.

87. The vector of claim 86, wherein the vector comprises a heterologous promoter driving expression of the polynucleotide.

88. A cell comprising the fusion protein of claim 1.

89. A cell comprising the complex of any of claim 46.

90. A cell comprising the nucleic acid molecule encoding the fusion protein of claim 1.

91. A method for producing a ribonucleoprotein (RNP) complex, the method comprising:
(i) complexing a base editor protein with an RNA in an aqueous solution, thereby forming a complex comprising the base editor and the RNA in the aqueous solution; and
(ii) contacting the complex of (i) with a cationic lipid.

92-112. (canceled)

113. A pharmaceutical composition produced by the method of claim 91.

114. A pharmaceutical composition comprising the fusion protein of claim.

115. A pharmaceutical composition comprising the complex of claim 41.

116. A pharmaceutical composition comprising the complex of claim 46.

117. (canceled)

118. A method for purifying a base editor protein, the method comprising:
(i) expressing the base editor protein in a cell, wherein the base editor protein comprises an affinity tag;
(ii) lysing the cell of (i), thereby generating a lysate; and
(iii) subjecting the lysate to affinity chromatography, thereby producing an eluent comprising a purified base editor protein.

119-126. (canceled)

127. A method comprising delivering the fusion protein of claim 1 to the inner ear of a subject.

128-131. (canceled)

132. A method comprising delivering the fusion protein of claim 1 to a zebrafish embryo.

133-136. (canceled)

137. A fusion protein comprising: (i) a nucleic acid programmable DNA binding protein (napDNAbp); (ii) a cytidine deaminase domain; (iii) a first uracil glycosylase inhibitor (UGI) domain; and (iv) a second uracil glycosylase inhibitor (UGI) domain.

138. The fusion protein of claim 137, wherein the nucleic acid programmable DNA binding protein (napDNAbp) is is a CasX, CasY, Cpf1, Cpf1 nickase, dCpf1, C2c1, C2c2, C2c3, Cas9, dCas9, Cas9 nickase or Argonaute protein.

139. (canceled)

140-143. (canceled)

144. The fusion protein of claim 137, wherein the cytidine deaminase domain is a deaminase from the apolipoprotein B mRNA-editing complex (APOBEC) family deaminase.

145. (canceled)

146. The fusion protein of claim 137, wherein the cytidine deaminase domain comprises an amino acid sequence that is at least 85%, 90%, 95%, or 98% identical to an amino acid sequence of SEQ ID NO: 49-84.

147-152. (canceled)

153. The fusion protein of claim 137, wherein the fusion protein comprises the structure:
NH₂-[cytidine deaminase domain]-[napDNAbp]-[first UGI domain]-[second UGI domain]-COOH;
NH₂-[first UGI domain]-[second UGI domain]-[cytidine deaminase domain]-[napDNAbp]-COOH;
NH₂-[napDNAbp]-[cytidine deaminase domain]-[first UGI domain]-[second UGI domain]-COOH; or
NH₂-[first UGI domain]-[second UGI domain]-[napDNAbp]-[cytidine deaminase domain]-COOH;
wherein each instance of “-” comprises an optional linker.

154. (canceled)

155. The fusion protein of claim 137, wherein the cytidine deaminase domain and the napDNAbp are linked via a linker comprising the amino acid sequence: SGGSSGGSSGSETPGTSESATPESSGGSSGGS (SEQ ID NO: 605).

156-162. (canceled)

163. A complex comprising the fusion protein of claim 137 and a guide RNA bound to the napDNAbp of the fusion protein.

164. A method comprising contacting a nucleic acid molecule with the fusion protein of claim 137 and a guide RNA, wherein the guide RNA comprises a sequence of at least 10 contiguous nucleotides that is complementary to a target sequence in the genome of an organism and comprises a target base pair.

165-175. (canceled)

176. A method for editing a nucleobase pair of a double-stranded DNA sequence, the method comprising:
contacting a target region of the double-stranded DNA sequence with a complex comprising a nucleobase editor and a guide nucleic acid, wherein the target region comprises a target nucleobase pair;
inducing strand separation of said target region;
converting a first nucleobase of said target nucleobase pair in a single strand of the target region to a second nucleobase; and
cutting no more than one strand of said target region;
wherein a third nucleobase complementary to the first nucleobase base is replaced by a fourth nucleobase complementary to the second nucleobase;
wherein the method causes less than 20% indel formation in the double-stranded DNA sequence; and
wherein the nucleobase editor comprises CasX, CasY, Cpf1, C2c1, C2c2, C2c3, or Argonaute.

177-207. (canceled)

The application's sequence listing, which the Patent Office published only in electronic form, follows.

SEQUENCE LISTING (751 sequences)

SEQ ID NO: 1 - DNA, 4104 bp, Streptococcus pyogenes
atggataagaaatactcaataggcttagatatcggcacaaatagcgtcggatgggcggtgatcactgatgattataaggttccgtctaaaaagttcaaggttctgggaaatacagaccgccacagtatcaaaaaaaatcttataggggctcttttatttggcagtggagagacagcggaagcgactcgtctcaaacggacagctcgtagaaggtatacacgtcggaagaatcgtatttgttatctacaggagattttttcaaatgagatggcgaaagtagatgatagtttctttcatcgacttgaagagtcttttttggtggaagaagacaagaagcatgaacgtcatcctatttttggaaatatagtagatgaagttgcttatcatgagaaatatccaactatctatcatctgcgaaaaaaattggcagattctactgataaagcggatttgcgcttaatctatttggccttagcgcatatgattaagtttcgtggtcattttttgattgagggagatttaaatcctgataatagtgatgtggacaaactatttatccagttggtacaaatctacaatcaattatttgaagaaaaccctattaacgcaagtagagtagatgctaaagcgattctttctgcacgattgagtaaatcaagacgattagaaaatctcattgctcagctccccggtgagaagagaaatggcttgtttgggaatctcattgctttgtcattgggattgacccctaattttaaatcaaattttgatttggcagaagatgctaaattacagctttcaaaagatacttacgatgatgatttagataatttattggcgcaaattggagatcaatatgctgatttgtttttggcagctaagaatttatcagatgctattttactttcagatatcctaagagtaaatagtgaaataactaaggctcccctatcagcttcaatgattaagcgctacgatgaacatcatcaagacttgactcttttaaaagctttagttcgacaacaacttccagaaaagtataaagaaatcttttttgatcaatcaaaaaacggatatgcaggttatattgatgggggagctagccaagaagaattttataaatttatcaaaccaattttagaaaaaatggatggtactgaggaattattggtgaaactaaatcgtgaagatttgctgcgcaagcaacggacctttgacaacggctctattccccatcaaattcacttgggtgagctgcatgctattttgagaagacaagaagacttttatccatttttaaaagacaatcgtgagaagattgaaaaaatcttgacttttcgaattccttattatgttggtccattggcgcgtggcaatagtcgttttgcatggatgactcggaagtctgaagaaacaattaccccatggaattttgaagaagttgtcgataaaggtgcttcagctcaatcatttattgaacgcatgacaaactttgataaaaatcttccaaatgaaaaagtactaccaaaacatagtttgctttatgagtattttacggtttataacgaattgacaaaggtcaaatatgttactgagggaatgcgaaaaccagcatttctttcaggtgaacagaagaaagccattgttgatttactcttcaaaacaaatcgaaaagtaaccgttaagcaattaaaagaagattatttcaaaaaaatagaatgttttgatagtgttgaaatttcaggagttgaagatagatttaatgcttcattaggcgcctaccatgatttgctaaaaattattaaagataaagattttttggataatgaagaaaatgaagatatcttagaggatattgttttaacattgaccttatttgaagatagggggatgattgaggaaagacttaaaacatatgctcacctctttgatgataaggtgatgaaacagcttaaacgtcgccgttatactggttggggacgtttgtctcgaaaattgattaatggtattagggataagcaatctggcaaaacaatattagattttttgaaatcagatggttttgccaatcgcaattttatgcagctgatccatgatgatagtttgacatttaaagaagatattcaaaaagcacaggtgtctggacaaggccatagtttacatgaacagattgctaacttagctggcagtcctgctattaaaaaaggtattttacagactgtaaaaattgttgatgaactggtcaaagtaatggggcataagccagaaaatatcgttattgaaatggcacgtgaaaatcagacaactcaaaagggccagaaaaattcgcgagagcgtatgaaacgaatcgaagaaggtatcaaagaattaggaagtcagattcttaaagagcatcctgttgaaaatactcaattgcaaaatgaaaagctctatctctattatctacaaaatggaagagacatgtatgtggaccaagaattagatattaatcgtttaagtgattatgatgtcgatcacattgttccacaaagtttcattaaagacgattcaatagacaataaggtactaacgcgttctgataaaaatcgtggtaaatcggataacgttccaagtgaagaagtagtcaaaaagatgaaaaactattggagacaacttctaaacgccaagttaatcactcaacgtaagtttgataatttaacgaaagctgaacgtggaggtttgagtgaacttgataaagctggttttatcaaacgccaattggttgaaactcgccaaatcactaagcatgtggcacaaattttggatagtcgcatgaatactaaatacgatgaaaatgataaacttattcgagaggttaaagtgattaccttaaaatctaaattagtttctgacttccgaaaagatttccaattctataaagtacgtgagattaacaattaccatcatgcccatgatgcgtatctaaatgccgtcgttggaactgctttgattaagaaatatccaaaacttgaatcggagtttgtctatggtgattataaagtttatgatgttcgtaaaatgattgctaagtctgagcaagaaataggcaaagcaaccgcaaaatatttcttttactctaatatcatgaacttcttcaaaacagaaattacacttgcaaatggagagattcgcaaacgccctctaatcgaaactaatggggaaactggagaaattgtctgggataaagggcgagattttgccacagtgcgcaaagtattgtccatgccccaagtcaatattgtcaagaaaacagaagtacagacaggcggattctccaaggagtcaattttaccaaaaagaaattcggacaagcttattgctcgtaaaaaagactgggatccaaaaaaatatggtggttttgatagtccaacggtagcttattcagtcctagtggttgctaaggtggaaaaagggaaatcgaagaagttaaaatccgttaaagagttactagggatcacaattatggaaagaagttcctttgaaaaaaatccgattgactttttagaagctaaaggatataaggaagttaaaaaagacttaatcattaaactacctaaatatagtctttttgagttagaaaacggtcgtaaacggatgctggctagtgccggagaattacaaaaaggaaatgagctggctctgccaagcaaatatgtgaattttttatatttagctagtcattatgaaaagttgaagggtagtccagaagataacgaacaaaaacaattgtttgtggagcagcataagcattatttagatgagattattgagcaaatcagtgaattttctaagcgtgttattttagcagatgccaatttagataaagttcttagtgcatataacaaacatagagacaaaccaatacgtgaacaagcagaaaatattattcatttatttacgttgacgaatcttggagctcccgctgcttttaaatattttgatacaacaattgatcgtaaacgatatacgtctacaaaagaagttttagatgccactcttatccatcaatccatcactggtctttatgaaacacgcattgatttgagtcagctaggaggtgactga

SEQ ID NO: 2 - protein, 1367 aa, Streptococcus pyogenes
MDKKYSIGLDIGTNSVGWAVITDDYKVPSKKFKVLGNTDRHSIKKNLIGALLFGSGETAEATRLKRTARRRYTRRKNRICYLQEIFSNEMAKVDDSFFHRLEESFLVEEDKKHERHPIFGNIVDEVAYHEKYPTIYHLRKKLADSTDKADLRLIYLALAHMIKFRGHFLIEGDLNPDNSDVDKLFIQLVQIYNQLFEENPINASRVDAKAILSARLSKSRRLENLIAQLPGEKRNGLFGNLIALSLGLTPNFKSNFDLAEDAKLQLSKDTYDDDLDNLLAQIGDQYADLFLAAKNLSDAILLSDILRVNSEITKAPLSASMIKRYDEHHQDLTLLKALVRQQLPEKYKEIFFDQSKNGYAGYIDGGASQEEFYKFIKPILEKMDGTEELLVKLNREDLLRKQRTFDNGSIPHQIHLGELHAILRRQEDFYPFLKDNREKIEKILTFRIPYYVGPLARGNSRFAWMTRKSEETITPWNFEEVVDKGASAQSFIERMTNFDKNLPNEKVLPKHSLLYEYFTVYNELTKVKYVTEGMRKPAFLSGEQKKAIVDLLFKTNRKVTVKQLKEDYFKKIECFDSVEISGVEDRFNASLGAYHDLLKIIKDKDFLDNEENEDILEDIVLTLTLFEDRGMIEERLKTYAHLFDDKVMKQLKRRRYTGWGRLSRKLINGIRDKQSGKTILDFLKSDGFANRNFMQLIHDDSLTFKEDIQKAQVSGQGHSLHEQIANLAGSPAIKKGILQTVKIVDELVKVMGHKPENIVIEMARENQTTQKGQKNSRERMKRIEEGIKELGSQILKEHPVENTQLQNEKLYLYYLQNGRDMYVDQELDINRLSDYDVDHIVPQSFIKDDSIDNKVLTRSDKNRGKSDNVPSEEVVKKMKNYWRQLLNAKLITQRKFDNLTKAERGGLSELDKAGFIKRQLVETRQITKHVAQILDSRMNTKYDENDKLIREVKVITLKSKLVSDFRKDFQFYKVREINNYHHAHDAYLNAVVGTALIKKYPKLESEFVYGDYKVYDVRKMIAKSEQEIGKATAKYFFYSNIMNFFKTEITLANGEIRKRPLIETNGETGEIVWDKGRDFATVRKVLSMPQVNIVKKTEVQTGGFSKESILPKRNSDKLIARKKDWDPKKYGGFDSPTVAYSVLVVAKVEKGKSKKLKSVKELLGITIMERSSFEKNPIDFLEAKGYKEVKKDLIIKLPKYSLFELENGRKRMLASAGELQKGNELALPSKYVNFLYLASHYEKLKGSPEDNEQKQLFVEQHKHYLDEIIEQISEFSKRVILADANLDKVLSAYNKHRDKPIREQAENIIHLFTLTNLGAPAAFKYFDTTIDRKRYTSTKEVLDATLIHQSITGLYETRIDLSQLGGD

SEQ ID NO: 3 - DNA, 4212 bp, Artificial Sequence
  Synthetic Polynucleotide
atggataaaaagtattctattggtttagacatcggcactaattccgttggatgggctgtcataaccgatgaatacaaagtaccttcaaagaaatttaaggtgttggggaacacagaccgtcattcgattaaaaagaatcttatcggtgccctcctattcgatagtggcgaaacggcagaggcgactcgcctgaaacgaaccgctcggagaaggtatacacgtcgcaagaaccgaatatgttacttacaagaaatttttagcaatgagatggccaaagttgacgattctttctttcaccgtttggaagagtccttccttgtcgaagaggacaagaaacatgaacggcaccccatctttggaaacatagtagatgaggtggcatatcatgaaaagtacccaacgatttatcacctcagaaaaaagctagttgactcaactgataaagcggacctgaggttaatctacttggctcttgcccatatgataaagttccgtgggcactttctcattgagggtgatctaaatccggacaactcggatgtcgacaaactgttcatccagttagtacaaacctataatcagttgtttgaagagaaccctataaatgcaagtggcgtggatgcgaaggctattcttagcgcccgcctctctaaatcccgacggctagaaaacctgatcgcacaattacccggagagaagaaaaatgggttgttcggtaaccttatagcgctctcactaggcctgacaccaaattttaagtcgaacttcgacttagctgaagatgccaaattgcagcttagtaaggacacgtacgatgacgatctcgacaatctactggcacaaattggagatcagtatgcggacttatttttggctgccaaaaaccttagcgatgcaatcctcctatctgacatactgagagttaatactgagattaccaaggcgccgttatccgcttcaatgatcaaaaggtacgatgaacatcaccaagacttgacacttctcaaggccctagtccgtcagcaactgcctgagaaatataaggaaatattctttgatcagtcgaaaaacgggtacgcaggttatattgacggcggagcgagtcaagaggaattctacaagtttatcaaacccatattagagaagatggatgggacggaagagttgcttgtaaaactcaatcgcgaagatctactgcgaaagcagcggactttcgacaacggtagcattccacatcaaatccacttaggcgaattgcatgctatacttagaaggcaggaggatttttatccgttcctcaaagacaatcgtgaaaagattgagaaaatcctaacctttcgcataccttactatgtgggacccctggcccgagggaactctcggttcgcatggatgacaagaaagtccgaagaaacgattactccatggaattttgaggaagttgtcgataaaggtgcgtcagctcaatcgttcatcgagaggatgaccaactttgacaagaatttaccgaacgaaaaagtattgcctaagcacagtttactttacgagtatttcacagtgtacaatgaactcacgaaagttaagtatgtcactgagggcatgcgtaaacccgcctttctaagcggagaacagaagaaagcaatagtagatctgttattcaagaccaaccgcaaagtgacagttaagcaattgaaagaggactactttaagaaaattgaatgcttcgattctgtcgagatctccggggtagaagatcgatttaatgcgtcacttggtacgtatcatgacctcctaaagataattaaagataaggacttcctggataacgaagagaatgaagatatcttagaagatatagtgttgactcttaccctctttgaagatcgggaaatgattgaggaaagactaaaaacatacgctcacctgttcgacgataaggttatgaaacagttaaagaggcgtcgctatacgggctggggacgattgtcgcggaaacttatcaacgggataagagacaagcaaagtggtaaaactattctcgattttctaaagagcgacggcttcgccaataggaactttatgcagctgatccatgatgactctttaaccttcaaagaggatatacaaaaggcacaggtttccggacaaggggactcattgcacgaacatattgcgaatcttgctggttcgccagccatcaaaaagggcatactccagacagtcaaagtagtggatgagctagttaaggtcatgggacgtcacaaaccggaaaacattgtaatcgagatggcacgcgaaaatcaaacgactcagaaggggcaaaaaaacagtcgagagcggatgaagagaatagaagagggtattaaagaactgggcagccagatcttaaaggagcatcctgtggaaaatacccaattgcagaacgagaaactttacctctattacctacaaaatggaagggacatgtatgttgatcaggaactggacataaaccgtttatctgattacgacgtcgatcacattgtaccccaatcctttttgaaggacgattcaatcgacaataaagtgcttacacgctcggataagaaccgagggaaaagtgacaatgttccaagcgaggaagtcgtaaagaaaatgaagaactattggcggcagctcctaaatgcgaaactgataacgcaaagaaagttcgataacttaactaaagctgagaggggtggcttgtctgaacttgacaaggccggatttattaaacgtcagctcgtggaaacccgccaaatcacaaagcatgttgcacagatactagattcccgaatgaatacgaaatacgacgagaacgataagctgattcgggaagtcaaagtaatcactttaaagtcaaaattggtgtcggacttcagaaaggattttcaattctataaagttagggagataaataactaccaccatgcgcacgacgcttatcttaatgccgtcgtagggaccgcactcattaagaaatacccgaagctagaaagtgagtttgtgtatggtgattacaaagtttatgacgtccgtaagatgatcgcgaaaagcgaacaggagataggcaaggctacagccaaatacttcttttattctaacattatgaatttctttaagacggaaatcactctggcaaacggagagatacgcaaacgacctttaattgaaaccaatggggagacaggtgaaatcgtatgggataagggccgggacttcgcgacggtgagaaaagttttgtccatgccccaagtcaacatagtaaagaaaactgaggtgcagaccggagggttttcaaaggaatcgattcttccaaaaaggaatagtgataagctcatcgctcgtaaaaaggactgggacccgaaaaagtacggtggcttcgatagccctacagttgcctattctgtcctagtagtggcaaaagttgagaagggaaaatccaagaaactgaagtcagtcaaagaattattggggataacgattatggagcgctcgtcttttgaaaagaaccccatcgacttccttgaggcgaaaggttacaaggaagtaaaaaaggatctcataattaaactaccaaagtatagtctgtttgagttagaaaatggccgaaaacggatgttggctagcgccggagagcttcaaaaggggaacgaactcgcactaccgtctaaatacgtgaatttcctgtatttagcgtcccattacgagaagttgaaaggttcacctgaagataacgaacagaagcaactttttgttgagcagcacaaacattatctcgacgaaatcatagagcaaatttcggaattcagtaagagagtcatcctagctgatgccaatctggacaaagtattaagcgcatacaacaagcacagggataaacccatacgtgagcaggcggaaaatattatccatttgtttactcttaccaacctcggcgctccagccgcattcaagtattttgacacaacgatagatcgcaaacgatacacttctaccaaggaggtgctagacgcgacactgattcaccaatccatcacgggattatatgaaactcggatagatttgtcacagcttgggggtgacggatcccccaagaagaagaggaaagtctcgagcgactacaaagaccatgacggtgattataaagatcatgacatcgattacaaggatgacgatgacaaggctgcagga

SEQ ID NO: 4 - protein, 1368 aa, Artificial Sequence
  Synthetic Polypeptide
MDKKYSIGLAIGTNSVGWAVITDEYKVPSKKFKVLGNTDRHSIKKNLIGALLFDSGETAEATRLKRTARRRYTRRKNRICYLQEIFSNEMAKVDDSFFHRLEESFLVEEDKKHERHPIFGNIVDEVAYHEKYPTIYHLRKKLVDSTDKADLRLIYLALAHMIKFRGHFLIEGDLNPDNSDVDKLFIQLVQTYNQLFEENPINASGVDAKAILSARLSKSRRLENLIAQLPGEKKNGLFGNLIALSLGLTPNFKSNFDLAEDAKLQLSKDTYDDDLDNLLAQIGDQYADLFLAAKNLSDAILLSDILRVNTEITKAPLSASMIKRYDEHHQDLTLLKALVRQQLPEKYKEIFFDQSKNGYAGYIDGGASQEEFYKFIKPILEKMDGTEELLVKLNREDLLRKQRTFDNGSIPHQIHLGELHAILRRQEDFYPFLKDNREKIEKILTFRIPYYVGPLARGNSRFAWMTRKSEETITPWNFEEVVDKGASAQSFIERMTNFDKNLPNEKVLPKHSLLYEYFTVYNELTKVKYVTEGMRKPAFLSGEQKKAIVDLLFKTNRKVTVKQLKEDYFKKIECFDSVEISGVEDRFNASLGTYHDLLKIIKDKDFLDNEENEDILEDIVLTLTLFEDREMIEERLKTYAHLFDDKVMKQLKRRRYTGWGRLSRKLINGIRDKQSGKTILDFLKSDGFANRNFMQLIHDDSLTFKEDIQKAQVSGQGDSLHEHIANLAGSPAIKKGILQTVKVVDELVKVMGRHKPENIVIEMARENQTTQKGQKNSRERMKRIEEGIKELGSQILKEHPVENTQLQNEKLYLYYLQNGRDMYVDQELDINRLSDYDVDHIVPQSFLKDDSIDNKVLTRSDKNRGKSDNVPSEEVVKKMKNYWRQLLNAKLITQRKFDNLTKAERGGLSELDKAGFIKRQLVETRQITKHVAQILDSRMNTKYDENDKLIREVKVITLKSKLVSDFRKDFQFYKVREINNYHHAHDAYLNAVVGTALIKKYPKLESEFVYGDYKVYDVRKMIAKSEQEIGKATAKYFFYSNIMNFFKTEITLANGEIRKRPLIETNGETGEIVWDKGRDFATVRKVLSMPQVNIVKKTEVQTGGFSKESILPKRNSDKLIARKKDWDPKKYGGFDSPTVAYSVLVVAKVEKGKSKKLKSVKELLGITIMERSSFEKNPIDFLEAKGYKEVKKDLIIKLPKYSLFELENGRKRMLASAGELQKGNELALPSKYVNFLYLASHYEKLKGSPEDNEQKQLFVEQHKHYLDEIIEQISEFSKRVILADANLDKVLSAYNKHRDKPIREQAENIIHLFTLTNLGAPAAFKYFDTTIDRKRYTSTKEVLDATLIHQSITGLYETRIDLSQLGGD

SEQ ID NO: 5 - DNA, 4107 bp, Streptococcus pyogenes
atggataagaaatactcaataggcttagatatcggcacaaatagcgtcggatgggcggtgatcactgatgaatataaggttccgtctaaaaagttcaaggttctgggaaatacagaccgccacagtatcaaaaaaaatcttataggggctcttttatttgacagtggagagacagcggaagcgactcgtctcaaacggacagctcgtagaaggtatacacgtcggaagaatcgtatttgttatctacaggagattttttcaaatgagatggcgaaagtagatgatagtttctttcatcgacttgaagagtcttttttggtggaagaagacaagaagcatgaacgtcatcctatttttggaaatatagtagatgaagttgcttatcatgagaaatatccaactatctatcatctgcgaaaaaaattggtagattctactgataaagcggatttgcgcttaatctatttggccttagcgcatatgattaagtttcgtggtcattttttgattgagggagatttaaatcctgataatagtgatgtggacaaactatttatccagttggtacaaacctacaatcaattatttgaagaaaaccctattaacgcaagtggagtagatgctaaagcgattctttctgcacgattgagtaaatcaagacgattagaaaatctcattgctcagctccccggtgagaagaaaaatggcttatttgggaatctcattgctttgtcattgggtttgacccctaattttaaatcaaattttgatttggcagaagatgctaaattacagctttcaaaagatacttacgatgatgatttagataatttattggcgcaaattggagatcaatatgctgatttgtttttggcagctaagaatttatcagatgctattttactttcagatatcctaagagtaaatactgaaataactaaggctcccctatcagcttcaatgattaaacgctacgatgaacatcatcaagacttgactcttttaaaagctttagttcgacaacaacttccagaaaagtataaagaaatcttttttgatcaatcaaaaaacggatatgcaggttatattgatgggggagctagccaagaagaattttataaatttatcaaaccaattttagaaaaaatggatggtactgaggaattattggtgaaactaaatcgtgaagatttgctgcgcaagcaacggacctttgacaacggctctattccccatcaaattcacttgggtgagctgcatgctattttgagaagacaagaagacttttatccatttttaaaagacaatcgtgagaagattgaaaaaatcttgacttttcgaattccttattatgttggtccattggcgcgtggcaatagtcgttttgcatggatgactcggaagtctgaagaaacaattaccccatggaattttgaagaagttgtcgataaaggtgcttcagctcaatcatttattgaacgcatgacaaactttgataaaaatcttccaaatgaaaaagtactaccaaaacatagtttgctttatgagtattttacggtttataacgaattgacaaaggtcaaatatgttactgaaggaatgcgaaaaccagcatttctttcaggtgaacagaagaaagccattgttgatttactcttcaaaacaaatcgaaaagtaaccgttaagcaattaaaagaagattatttcaaaaaaatagaatgttttgatagtgttgaaatttcaggagttgaagatagatttaatgcttcattaggtacctaccatgatttgctaaaaattattaaagataaagattttttggataatgaagaaaatgaagatatcttagaggatattgttttaacattgaccttatttgaagatagggagatgattgaggaaagacttaaaacatatgctcacctctttgatgataaggtgatgaaacagcttaaacgtcgccgttatactggttggggacgtttgtctcgaaaattgattaatggtattagggataagcaatctggcaaaacaatattagattttttgaaatcagatggttttgccaatcgcaattttatgcagctgatccatgatgatagtttgacatttaaagaagacattcaaaaagcacaagtgtctggacaaggcgatagtttacatgaacatattgcaaatttagctggtagccctgctattaaaaaaggtattttacagactgtaaaagttgttgatgaattggtcaaagtaatggggcggcataagccagaaaatatcgttattgaaatggcacgtgaaaatcagacaactcaaaagggccagaaaaattcgcgagagcgtatgaaacgaatcgaagaaggtatcaaagaattaggaagtcagattcttaaagagcatcctgttgaaaatactcaattgcaaaatgaaaagctctatctctattatctccaaaatggaagagacatgtatgtggaccaagaattagatattaatcgtttaagtgattatgatgtcgatcacattgttccacaaagtttccttaaagacgattcaatagacaataaggtcttaacgcgttctgataaaaatcgtggtaaatcggataacgttccaagtgaagaagtagtcaaaaagatgaaaaactattggagacaacttctaaacgccaagttaatcactcaacgtaagtttgataatttaacgaaagctgaacgtggaggtttgagtgaacttgataaagctggttttatcaaacgccaattggttgaaactcgccaaatcactaagcatgtggcacaaattttggatagtcgcatgaatactaaatacgatgaaaatgataaacttattcgagaggttaaagtgattaccttaaaatctaaattagtttctgacttccgaaaagatttccaattctataaagtacgtgagattaacaattaccatcatgcccatgatgcgtatctaaatgccgtcgttggaactgctttgattaagaaatatccaaaacttgaatcggagtttgtctatggtgattataaagtttatgatgttcgtaaaatgattgctaagtctgagcaagaaataggcaaagcaaccgcaaaatatttcttttactctaatatcatgaacttcttcaaaacagaaattacacttgcaaatggagagattcgcaaacgccctctaatcgaaactaatggggaaactggagaaattgtctgggataaagggcgagattttgccacagtgcgcaaagtattgtccatgccccaagtcaatattgtcaagaaaacagaagtacagacaggcggattctccaaggagtcaattttaccaaaaagaaattcggacaagcttattgctcgtaaaaaagactgggatccaaaaaaatatggtggttttgatagtccaacggtagcttattcagtcctagtggttgctaaggtggaaaaagggaaatcgaagaagttaaaatccgttaaagagttactagggatcacaattatggaaagaagttcctttgaaaaaaatccgattgactttttagaagctaaaggatataaggaagttaaaaaagacttaatcattaaactacctaaatatagtctttttgagttagaaaacggtcgtaaacggatgctggctagtgccggagaattacaaaaaggaaatgagctggctctgccaagcaaatatgtgaattttttatatttagctagtcattatgaaaagttgaagggtagtccagaagataacgaacaaaaacaattgtttgtggagcagcataagcattatttagatgagattattgagcaaatcagtgaattttctaagcgtgttattttagcagatgccaatttagataaagttcttagtgcatataacaaacatagagacaaaccaatacgtgaacaagcagaaaatattattcatttatttacgttgacgaatcttggagctcccgctgcttttaaatattttgatacaacaattgatcgtaaacgatatacgtctacaaaagaagttttagatgccactcttatccatcaatccatcactggtctttatgaaacacgcattgatttgagtcagctaggaggtgactga

SEQ ID NO: 6 - protein, 1368 aa, Streptococcus pyogenes [sequence omitted]

SEQ ID NO: 7 - protein, 1368 aa, Artificial Sequence
  Synthetic Polypeptide
MDKKYSIGLAIGTNSVGWAVITDEYKVPSKKFKVLGNTDRHSIKKNLIGALLFDSGETAEATRLKRTARRRYTRRKNRICYLQEIFSNEMAKVDDSFFHRLEESFLVEEDKKHERHPIFGNIVDEVAYHEKYPTIYHLRKKLVDSTDKADLRLIYLALAHMIKFRGHFLIEGDLNPDNSDVDKLFIQLVQTYNQLFEENPINASGVDAKAILSARLSKSRRLENLIAQLPGEKKNGLFGNLIALSLGLTPNFKSNFDLAEDAKLQLSKDTYDDDLDNLLAQIGDQYADLFLAAKNLSDAILLSDILRVNTEITKAPLSASMIKRYDEHHQDLTLLKALVRQQLPEKYKEIFFDQSKNGYAGYIDGGASQEEFYKFIKPILEKMDGTEELLVKLNREDLLRKQRTFDNGSIPHQIHLGELHAILRRQEDFYPFLKDNREKIEKILTFRIPYYVGPLARGNSRFAWMTRKSEETITPWNFEEVVDKGASAQSFIERMTNFDKNLPNEKVLPKHSLLYEYFTVYNELTKVKYVTEGMRKPAFLSGEQKKAIVDLLFKTNRKVTVKQLKEDYFKKIECFDSVEISGVEDRFNASLGTYHDLLKIIKDKDFLDNEENEDILEDIVLTLTLFEDREMIEERLKTYAHLFDDKVMKQLKRRRYTGWGRLSRKLINGIRDKQSGKTILDFLKSDGFANRNFMQLIHDDSLTFKEDIQKAQVSGQGDSLHEHIANLAGSPAIKKGILQTVKVVDELVKVMGRHKPENIVIEMARENQTTQKGQKNSRERMKRIEEGIKELGSQILKEHPVENTQLQNEKLYLYYLQNGRDMYVDQELDINRLSDYDVDAIVPQSFLKDDSIDNKVLTRSDKNRGKSDNVPSEEVVKKMKNYWRQLLNAKLITQRKFDNLTKAERGGLSELDKAGFIKRQLVETRQITKHVAQILDSRMNTKYDENDKLIREVKVITLKSKLVSDFRKDFQFYKVREINNYHHAHDAYLNAVVGTALIKKYPKLESEFVYGDYKVYDVRKMIAKSEQEIGKATAKYFFYSNIMNFFKTEITLANGEIRKRPLIETNGETGEIVWDKGRDFATVRKVLSMPQVNIVKKTEVQTGGFSKESILPKRNSDKLIARKKDWDPKKYGGFDSPTVAYSVLVVAKVEKGKSKKLKSVKELLGITIMERSSFEKNPIDFLEAKGYKEVKKDLIIKLPKYSLFELENGRKRMLASAGELQKGNELALPSKYVNFLYLASHYEKLKGSPEDNEQKQLFVEQHKHYLDEIIEQISEFSKRVILADANLDKVLSAYNKHRDKPIREQAENIIHLFTLTNLGAPAAFKYFDTTIDRKRYTSTKEVLDATLIHQSITGLYETRIDLSQLGGD

SEQ ID NO: 8 - protein, 1368 aa, Artificial Sequence; identical to SEQ ID NO: 4
  Synthetic Polypeptide

SEQ ID NO: 9 - protein, 1300 aa, Francisella novicida
MSIYQEFVNKYSLSKTLRFELIPQGKTLENIKARGLILDDEKRAKDYKKAKQIIDKYHQFFIEEILSSVCISEDLLQNYSDVYFKLKKSDDDNLQKDFKSAKDTIKKQISEYIKDSEKFKNLFNQNLIDAKKGQESDLILWLKQSKDNGIELFKANSDITDIDEALEIIKSFKGWTTYFKGFHENRKNVYSSNDIPTSIIYRIVDDNLPKFLENKAKYESLKDKAPEAINYEQIKKDLAEELTFDIDYKTSEVNQRVFSLDEVFEIANFNNYLNQSGITKFNTIIGGKFVNGENTKRKGINEYINLYSQQINDKTLKKYKMSVLFKQILSDTESKSFVIDKLEDDSDVVTTMQSFYEQIAAFKTVEEKSIKETLSLLFDDLKAQKLDLSKIYFKNDKSLTDLSQQVFDDYSVIGTAVLEYITQQIAPKNLDNPSKKEQELIAKKTEKAKYLSLETIKLALEEFNKHRDIDKQCRFEEILANFAAIPMIFDEIAQNKDNLAQISIKYQNQGKKDLLQASAEDDVKAIKDLLDQTNNLLHKLKIFHISQSEDKANILDKDEHFYLVFEECYFELANIVPLYNKIRNYITQKPYSDEKFKLNFENSTLANGWDKNKEPDNTAILFIKDDKYYLGVMNKKNNKIFDDKAIKENKGEGYKKIVYKLLPGANKMLPKVFFSAKSIKFYNPSEDILRIRNHSTHTKNGSPQKGYEKFEFNIEDCRKFIDFYKQSISKHPEWKDFGFRFSDTQRYNSIDEFYREVENQGYKLTFENISESYIDSVVNQGKLYLFQIYNKDFSAYSKGRPNLHTLYWKALFDERNLQDVVYKLNGEAELFYRKQSIPKKITHPAKEAIANKNKDNPKKESVFEYDLIKDKRFTEDKFFFHCPITINFKSSGANKFNDEINLLLKEKANDVHILSIDRGERHLAYYTLVDGKGNIIKQDTFNIIGNDRMKTNYHDKLAAIEKDRDSARKDWKKINNIKEMKEGYLSQVVHEIAKLVIEYNAIVVFEDLNFGFKRGRFKVEKQVYQKLEKMLIEKLNYLVFKDNEFDKTGGVLRAYQLTAPFETFKKMGKQTGIIYYVPAGFTSKICPVTGFVNQLYPKYESVSKSQEFFSKFDKICYNLDKGYFEFSFDYKNFGDKAAKGKWTIASFGSRLINFRNSDKNHNWDTREVYPTKELEKLLKDYSIEYGHGECIKAAICGESDKKFFAKLTSVLNTILQMRNSKTGTELDYLISPVADVNGNFFDSRQAPKNMPQDADANGAYHIGLKGLMLLGRIKNNQEGKKLNLVIKNEEYFEFVQNRNN

SEQ ID NO: 10 - protein, 1300 aa, Artificial Sequence
  Synthetic Polypeptide
MSIYQEFVNKYSLSKTLRFELIPQGKTLENIKARGLILDDEKRAKDYKKAKQIIDKYHQFFIEEILSSVCISEDLLQNYSDVYFKLKKSDDDNLQKDFKSAKDTIKKQISEYIKDSEKFKNLFNQNLIDAKKGQESDLILWLKQSKDNGIELFKANSDITDIDEALEIIKSFKGWTTYFKGFHENRKNVYSSNDIPTSIIYRIVDDNLPKFLENKAKYESLKDKAPEAINYEQIKKDLAEELTFDIDYKTSEVNQRVFSLDEVFEIANFNNYLNQSGITKFNTIIGGKFVNGENTKRKGINEYINLYSQQINDKTLKKYKMSVLFKQILSDTESKSFVIDKLEDDSDVVTTMQSFYEQIAAFKTVEEKSIKETLSLLFDDLKAQKLDLSKIYFKNDKSLTDLSQQVFDDYSVIGTAVLEYITQQIAPKNLDNPSKKEQELIAKKTEKAKYLSLETIKLALEEFNKHRDIDKQCRFEEILANFAAIPMIFDEIAQNKDNLAQISIKYQNQGKKDLLQASAEDDVKAIKDLLDQTNNLLHKLKIFHISQSEDKANILDKDEHFYLVFEECYFELANIVPLYNKIRNYITQKPYSDEKFKLNFENSTLANGWDKNKEPDNTAILFIKDDKYYLGVMNKKNNKIFDDKAIKENKGEGYKKIVYKLLPGANKMLPKVFFSAKSIKFYNPSEDILRIRNHSTHTKNGSPQKGYEKFEFNIEDCRKFIDFYKQSISKHPEWKDFGFRFSDTQRYNSIDEFYREVENQGYKLTFENISESYIDSVVNQGKLYLFQIYNKDFSAYSKGRPNLHTLYWKALFDERNLQDVVYKLNGEAELFYRKQSIPKKITHPAKEAIANKNKDNPKKESVFEYDLIKDKRFTEDKFFFHCPITINFKSSGANKFNDEINLLLKEKANDVHILSIARGERHLAYYTLVDGKGNIIKQDTFNIIGNDRMKTNYHDKLAAIEKDRDSARKDWKKINNIKEMKEGYLSQVVHEIAKLVIEYNAIVVFEDLNFGFKRGRFKVEKQVYQKLEKMLIEKLNYLVFKDNEFDKTGGVLRAYQLTAPFETFKKMGKQTGIIYYVPAGFTSKICPVTGFVNQLYPKYESVSKSQEFFSKFDKICYNLDKGYFEFSFDYKNFGDKAAKGKWTIASFGSRLINFRNSDKNHNWDTREVYPTKELEKLLKDYSIEYGHGECIKAAICGESDKKFFAKLTSVLNTILQMRNSKTGTELDYLISPVADVNGNFFDSRQAPKNMPQDADANGAYHIGLKGLMLLGRIKNNQEGKKLNLVIKNEEYFEFVQNRNN

SEQ ID NO: 11 - protein, 1300 aa, Artificial Sequence
  Synthetic Polypeptide
MSIYQEFVNKYSLSKTLRFELIPQGKTLENIKARGLILDDEKRAKDYKKAKQIIDKYHQFFIEEILSSVCISEDLLQNYSDVYFKLKKSDDDNLQKDFKSAKDTIKKQISEYIKDSEKFKNLFNQNLIDAKKGQESDLILWLKQSKDNGIELFKANSDITDIDEALEIIKSFKGWTTYFKGFHENRKNVYSSNDIPTSIIYRIVDDNLPKFLENKAKYESLKDKAPEAINYEQIKKDLAEELTFDIDYKTSEVNQRVFSLDEVFEIANFNNYLNQSGITKFNTIIGGKFVNGENTKRKGINEYINLYSQQINDKTLKKYKMSVLFKQILSDTESKSFVIDKLEDDSDVVTTMQSFYEQIAAFKTVEEKSIKETLSLLFDDLKAQKLDLSKIYFKNDKSLTDLSQQVFDDYSVIGTAVLEYITQQIAPKNLDNPSKKEQELIAKKTEKAKYLSLETIKLALEEFNKHRDIDKQCRFEEILANFAAIPMIFDEIAQNKDNLAQISIKYQNQGKKDLLQASAEDDVKAIKDLLDQTNNLLHKLKIFHISQSEDKANILDKDEHFYLVFEECYFELANIVPLYNKIRNYITQKPYSDEKFKLNFENSTLANGWDKNKEPDNTAILFIKDDKYYLGVMNKKNNKIFDDKAIKENKGEGYKKIVYKLLPGANKMLPKVFFSAKSIKFYNPSEDILRIRNHSTHTKNGSPQKGYEKFEFNIEDCRKFIDFYKQSISKHPEWKDFGFRFSDTQRYNSIDEFYREVENQGYKLTFENISESYIDSVVNQGKLYLFQIYNKDFSAYSKGRPNLHTLYWKALFDERNLQDVVYKLNGEAELFYRKQSIPKKITHPAKEAIANKNKDNPKKESVFEYDLIKDKRFTEDKFFFHCPITINFKSSGANKFNDEINLLLKEKANDVHILSIDRGERHLAYYTLVDGKGNIIKQDTFNIIGNDRMKTNYHDKLAAIEKDRDSARKDWKKINNIKEMKEGYLSQVVHEIAKLVIEYNAIVVFADLNFGFKRGRFKVEKQVYQKLEKMLIEKLNYLVFKDNEFDKTGGVLRAYQLTAPFETFKKMGKQTGIIYYVPAGFTSKICPVTGFVNQLYPKYESVSKSQEFFSKFDKICYNLDKGYFEFSFDYKNFGDKAAKGKWTIASFGSRLINFRNSDKNHNWDTREVYPTKELEKLLKDYSIEYGHGECIKAAICGESDKKFFAKLTSVLNTILQMRNSKTGTELDYLISPVADVNGNFFDSRQAPKNMPQDADANGAYHIGLKGLMLLGRIKNNQEGKKLNLVIKNEEYFEFVQNRNN

SEQ ID NO: 12 - protein, 1300 aa, Artificial Sequence
  Synthetic Polypeptide
MSIYQEFVNKYSLSKTLRFELIPQGKTLENIKARGLILDDEKRAKDYKKAKQIIDKYHQFFIEEILSSVCISEDLLQNYSDVYFKLKKSDDDNLQKDFKSAKDTIKKQISEYIKDSEKFKNLFNQNLIDAKKGQESDLILWLKQSKDNGIELFKANSDITDIDEALEIIKSFKGWTTYFKGFHENRKNVYSSNDIPTSIIYRIVDDNLPKFLENKAKYESLKDKAPEAINYEQIKKDLAEELTFDIDYKTSEVNQRVFSLDEVFEIANFNNYLNQSGITKFNTIIGGKFVNGENTKRKGINEYINLYSQQINDKTLKKYKMSVLFKQILSDTESKSFVIDKLEDDSDVVTTMQSFYEQIAAFKTVEEKSIKETLSLLFDDLKAQKLDLSKIYFKNDKSLTDLSQQVFDDYSVIGTAVLEYITQQIAPKNLDNPSKKEQELIAKKTEKAKYLSLETIKLALEEFNKHRDIDKQCRFEEILANFAAIPMIFDEIAQNKDNLAQISIKYQNQGKKDLLQASAEDDVKAIKDLLDQTNNLLHKLKIFHISQSEDKANILDKDEHFYLVFEECYFELANIVPLYNKIRNYITQKPYSDEKFKLNFENSTLANGWDKNKEPDNTAILFIKDDKYYLGVMNKKNNKIFDDKAIKENKGEGYKKIVYKLLPGANKMLPKVFFSAKSIKFYNPSEDILRIRNHSTHTKNGSPQKGYEKFEFNIEDCRKFIDFYKQSISKHPEWKDFGFRFSDTQRYNSIDEFYREVENQGYKLTFENISESYIDSVVNQGKLYLFQIYNKDFSAYSKGRPNLHTLYWKALFDERNLQDVVYKLNGEAELFYRKQSIPKKITHPAKEAIANKNKDNPKKESVFEYDLIKDKRFTEDKFFFHCPITINFKSSGANKFNDEINLLLKEKANDVHILSIDRGERHLAYYTLVDGKGNIIKQDTFNIIGNDRMKTNYHDKLAAIEKDRDSARKDWKKINNIKEMKEGYLSQVVHEIAKLVIEYNAIVVFEDLNFGFKRGRFKVEKQVYQKLEKMLIEKLNYLVFKDNEFDKTGGVLRAYQLTAPFETFKKMGKQTGIIYYVPAGFTSKICPVTGFVNQLYPKYESVSKSQEFFSKFDKICYNLDKGYFEFSFDYKNFGDKAAKGKWTIASFGSRLINFRNSDKNHNWDTREVYPTKELEKLLKDYSIEYGHGECIKAAICGESDKKFFAKLTSVLNTILQMRNSKTGTELDYLISPVADVNGNFFDSRQAPKNMPQDAAANGAYHIGLKGLMLLGRIKNNQEGKKLNLVIKNEEYFEFVQNRNN

SEQ ID NO: 13 - protein, 1300 aa, Artificial Sequence
  Synthetic Polypeptide
MSIYQEFVNKYSLSKTLRFELIPQGKTLENIKARGLILDDEKRAKDYKKAKQIIDKYHQFFIEEILSSVCISEDLLQNYSDVYFKLKKSDDDNLQKDFKSAKDTIKKQISEYIKDSEKFKNLFNQNLIDAKKGQESDLILWLKQSKDNGIELFKANSDITDIDEALEIIKSFKGWTTYFKGFHENRKNVYSSNDIPTSIIYRIVDDNLPKFLENKAKYESLKDKAPEAINYEQIKKDLAEELTFDIDYKTSEVNQRVFSLDEVFEIANFNNYLNQSGITKFNTIIGGKFVNGENTKRKGINEYINLYSQQINDKTLKKYKMSVLFKQILSDTESKSFVIDKLEDDSDVVTTMQSFYEQIAAFKTVEEKSIKETLSLLFDDLKAQKLDLSKIYFKNDKSLTDLSQQVFDDYSVIGTAVLEYITQQIAPKNLDNPSKKEQELIAKKTEKAKYLSLETIKLALEEFNKHRDIDKQCRFEEILANFAAIPMIFDEIAQNKDNLAQISIKYQNQGKKDLLQASAEDDVKAIKDLLDQTNNLLHKLKIFHISQSEDKANILDKDEHFYLVFEECYFELANIVPLYNKIRNYITQKPYSDEKFKLNFENSTLANGWDKNKEPDNTAILFIKDDKYYLGVMNKKNNKIFDDKAIKENKGEGYKKIVYKLLPGANKMLPKVFFSAKSIKFYNPSEDILRIRNHSTHTKNGSPQKGYEKFEFNIEDCRKFIDFYKQSISKHPEWKDFGFRFSDTQRYNSIDEFYREVENQGYKLTFENISESYIDSVVNQGKLYLFQIYNKDFSAYSKGRPNLHTLYWKALFDERNLQDVVYKLNGEAELFYRKQSIPKKITHPAKEAIANKNKDNPKKESVFEYDLIKDKRFTEDKFFFHCPITINFKSSGANKFNDEINLLLKEKANDVHILSIARGERHLAYYTLVDGKGNIIKQDTFNIIGNDRMKTNYHDKLAAIEKDRDSARKDWKKINNIKEMKEGYLSQVVHEIAKLVIEYNAIVVFADLNFGFKRGRFKVEKQVYQKLEKMLIEKLNYLVFKDNEFDKTGGVLRAYQLTAPFETFKKMGKQTGIIYYVPAGFTSKICPVTGFVNQLYPKYESVSKSQEFFSKFDKICYNLDKGYFEFSFDYKNFGDKAAKGKWTIASFGSRLINFRNSDKNHNWDTREVYPTKELEKLLKDYSIEYGHGECIKAAICGESDKKFFAKLTSVLNTILQMRNSKTGTELDYLISPVADVNGNFFDSRQAPKNMPQDADANGAYHIGLKGLMLLGRIKNNQEGKKLNLVIKNEEYFEFVQNRNN

SEQ ID NO: 14 - protein, 1300 aa, Artificial Sequence
  Synthetic Polypeptide
MSIYQEFVNKYSLSKTLRFELIPQGKTLENIKARGLILDDEKRAKDYKKAKQIIDKYHQFFIEEILSSVCISEDLLQNYSDVYFKLKKSDDDNLQKDFKSAKDTIKKQISEYIKDSEKFKNLFNQNLIDAKKGQESDLILWLKQSKDNGIELFKANSDITDIDEALEIIKSFKGWTTYFKGFHENRKNVYSSNDIPTSIIYRIVDDNLPKFLENKAKYESLKDKAPEAINYEQIKKDLAEELTFDIDYKTSEVNQRVFSLDEVFEIANFNNYLNQSGITKFNTIIGGKFVNGENTKRKGINEYINLYSQQINDKTLKKYKMSVLFKQILSDTESKSFVIDKLEDDSDVVTTMQSFYEQIAAFKTVEEKSIKETLSLLFDDLKAQKLDLSKIYFKNDKSLTDLSQQVFDDYSVIGTAVLEYITQQIAPKNLDNPSKKEQELIAKKTEKAKYLSLETIKLALEEFNKHRDIDKQCRFEEILANFAAIPMIFDEIAQNKDNLAQISIKYQNQGKKDLLQASAEDDVKAIKDLLDQTNNLLHKLKIFHISQSEDKANILDKDEHFYLVFEECYFELANIVPLYNKIRNYITQKPYSDEKFKLNFENSTLANGWDKNKEPDNTAILFIKDDKYYLGVMNKKNNKIFDDKAIKENKGEGYKKIVYKLLPGANKMLPKVFFSAKSIKFYNPSEDILRIRNHSTHTKNGSPQKGYEKFEFNIEDCRKFIDFYKQSISKHPEWKDFGFRFSDTQRYNSIDEFYREVENQGYKLTFENISESYIDSVVNQGKLYLFQIYNKDFSAYSKGRPNLHTLYWKALFDERNLQDVVYKLNGEAELFYRKQSIPKKITHPAKEAIANKNKDNPKKESVFEYDLIKDKRFTEDKFFFHCPITINFKSSGANKFNDEINLLLKEKANDVHILSIARGERHLAYYTLVDGKGNIIKQDTFNIIGNDRMKTNYHDKLAAIEKDRDSARKDWKKINNIKEMKEGYLSQVVHEIAKLVIEYNAIVVFEDLNFGFKRGRFKVEKQVYQKLEKMLIEKLNYLVFKDNEFDKTGGVLRAYQLTAPFETFKKMGKQTGIIYYVPAGFTSKICPVTGFVNQLYPKYESVSKSQEFFSKFDKICYNLDKGYFEFSFDYKNFGDKAAKGKWTIASFGSRLINFRNSDKNHNWDTREVYPTKELEKLLKDYSIEYGHGECIKAAICGESDKKFFAKLTSVLNTILQMRNSKTGTELDYLISPVADVNGNFFDSRQAPKNMPQDAAANGAYHIGLKGLMLLGRIKNNQEGKKLNLVIKNEEYFEFVQNRNN

SEQ ID NO: 15 - protein, 1300 aa, Artificial Sequence
  Synthetic Polypeptide
MSIYQEFVNKYSLSKTLRFELIPQGKTLENIKARGLILDDEKRAKDYKKAKQIIDKYHQFFIEEILSSVCISEDLLQNYSDVYFKLKKSDDDNLQKDFKSAKDTIKKQISEYIKDSEKFKNLFNQNLIDAKKGQESDLILWLKQSKDNGIELFKANSDITDIDEALEIIKSFKGWTTYFKGFHENRKNVYSSNDIPTSIIYRIVDDNLPKFLENKAKYESLKDKAPEAINYEQIKKDLAEELTFDIDYKTSEVNQRVFSLDEVFEIANFNNYLNQSGITKFNTIIGGKFVNGENTKRKGINEYINLYSQQINDKTLKKYKMSVLFKQILSDTESKSFVIDKLEDDSDVVTTMQSFYEQIAAFKTVEEKSIKETLSLLFDDLKAQKLDLSKIYFKNDKSLTDLSQQVFDDYSVIGTAVLEYITQQIAPKNLDNPSKKEQELIAKKTEKAKYLSLETIKLALEEFNKHRDIDKQCRFEEILANFAAIPMIFDEIAQNKDNLAQISIKYQNQGKKDLLQASAEDDVKAIKDLLDQTNNLLHKLKIFHISQSEDKANILDKDEHFYLVFEECYFELANIVPLYNKIRNYITQKPYSDEKFKLNFENSTLANGWDKNKEPDNTAILFIKDDKYYLGVMNKKNNKIFDDKAIKENKGEGYKKIVYKLLPGANKMLPKVFFSAKSIKFYNPSEDILRIRNHSTHTKNGSPQKGYEKFEFNIEDCRKFIDFYKQSISKHPEWKDFGFRFSDTQRYNSIDEFYREVENQGYKLTFENISESYIDSVVNQGKLYLFQIYNKDFSAYSKGRPNLHTLYWKALFDERNLQDVVYKLNGEAELFYRKQSIPKKITHPAKEAIANKNKDNPKKESVFEYDLIKDKRFTEDKFFFHCPITINFKSSGANKFNDEINLLLKEKANDVHILSIDRGERHLAYYTLVDGKGNIIKQDTFNIIGNDRMKTNYHDKLAAIEKDRDSARKDWKKINNIKEMKEGYLSQVVHEIAKLVIEYNAIVVFADLNFGFKRGRFKVEKQVYQKLEKMLIEKLNYLVFKDNEFDKTGGVLRAYQLTAPFETFKKMGKQTGIIYYVPAGFTSKICPVTGFVNQLYPKYESVSKSQEFFSKFDKICYNLDKGYFEFSFDYKNFGDKAAKGKWTIASFGSRLINFRNSDKNHNWDTREVYPTKELEKLLKDYSIEYGHGECIKAAICGESDKKFFAKLTSVLNTILQMRNSKTGTELDYLISPVADVNGNFFDSRQAPKNMPQDAAANGAYHIGLKGLMLLGRIKNNQEGKKLNLVIKNEEYFEFVQNRNN

SEQ ID NO: 16 - protein, 1300 aa, Artificial Sequence
  Synthetic Polypeptide
MSIYQEFVNKYSLSKTLRFELIPQGKTLENIKARGLILDDEKRAKDYKKAKQIIDKYHQFFIEEILSSVCISEDLLQNYSDVYFKLKKSDDDNLQKDFKSAKDTIKKQISEYIKDSEKFKNLFNQNLIDAKKGQESDLILWLKQSKDNGIELFKANSDITDIDEALEIIKSFKGWTTYFKGFHENRKNVYSSNDIPTSIIYRIVDDNLPKFLENKAKYESLKDKAPEAINYEQIKKDLAEELTFDIDYKTSEVNQRVFSLDEVFEIANFNNYLNQSGITKFNTIIGGKFVNGENTKRKGINEYINLYSQQINDKTLKKYKMSVLFKQILSDTESKSFVIDKLEDDSDVVTTMQSFYEQIAAFKTVEEKSIKETLSLLFDDLKAQKLDLSKIYFKNDKSLTDLSQQVFDDYSVIGTAVLEYITQQIAPKNLDNPSKKEQELIAKKTEKAKYLSLETIKLALEEFNKHRDIDKQCRFEEILANFAAIPMIFDEIAQNKDNLAQISIKYQNQGKKDLLQASAEDDVKAIKDLLDQTNNLLHKLKIFHISQSEDKANILDKDEHFYLVFEECYFELANIVPLYNKIRNYITQKPYSDEKFKLNFENSTLANGWDKNKEPDNTAILFIKDDKYYLGVMNKKNNKIFDDKAIKENKGEGYKKIVYKLLPGANKMLPKVFFSAKSIKFYNPSEDILRIRNHSTHTKNGSPQKGYEKFEFNIEDCRKFIDFYKQSISKHPEWKDFGFRFSDTQRYNSIDEFYREVENQGYKLTFENISESYIDSVVNQGKLYLFQIYNKDFSAYSKGRPNLHTLYWKALFDERNLQDVVYKLNGEAELFYRKQSIPKKITHPAKEAIANKNKDNPKKESVFEYDLIKDKRFTEDKFFFHCPITINFKSSGANKFNDEINLLLKEKANDVHILSIARGERHLAYYTLVDGKGNIIKQDTFNIIGNDRMKTNYHDKLAAIEKDRDSARKDWKKINNIKEMKEGYLSQVVHEIAKLVIEYNAIVVFADLNFGFKRGRFKVEKQVYQKLEKMLIEKLNYLVFKDNEFDKTGGVLRAYQLTAPFETFKKMGKQTGIIYYVPAGFTSKICPVTGFVNQLYPKYESVSKSQEFFSKFDKICYNLDKGYFEFSFDYKNFGDKAAKGKWTIASFGSRLINFRNSDKNHNWDTREVYPTKELEKLLKDYSIEYGHGECIKAAICGESDKKFFAKLTSVLNTILQMRNSKTGTELDYLISPVADVNGNFFDSRQAPKNMPQDAAANGAYHIGLKGLMLLGRIKNNQEGKKLNLVIKNEEYFEFVQNRNN

SEQ ID NO: 17 - protein, 1307 aa, Acidaminococcus species
TQFEGFTNLYQVSKTLRFELIPQGKTLKHIQEQGFIEEDKARNDHYKELKPIIDRIYKTYADQCLQLVQLDWENLSAAIDSYRKEKTEETRNALIEEQATYRNAIHDYFIGRTDNLTDAINKRHAEIYKGLFKAELFNGKVLKQLGTVTTTEHENALLRSFDKFTTYFSGFYENRKNVFSAEDISTAIPHRIVQDNFPKFKENCHIFTRLITAVPSLREHFENVKKAIGIFVSTSIEEVFSFPFYNQLLTQTQIDLYNQLLGGISREAGTEKIKGLNEVLNLAIQKNDETAHIIASLPHRFIPLFKQILSDRNTLSFILEEFKSDEEVIQSFCKYKTLLRNENVLETAEALFNELNSIDLTHIFISHKKLETISSALCDHWDTLRNALYERRISELTGKITKSAKEKVQRSLKHEDINLQEIISAAGKELSEAFKQKTSEILSHAHAALDQPLPTTMLKKQEEKEILKSQLDSLLGLYHLLDWFAVDESNEVDPEFSARLTGIKLEMEPSLSFYNKARNYATKKPYSVEKFKLNFQMPTLASGWDVNKEKNNGAILFVKNGLYYLGIMPKQKGRYKALSFEPTEKTSEGFDKMYYDYFPDAAKMIPKCSTQLKAVTAHFQTHTTPILLSNNFIEPLEITKEIYDLNNPEKEPKKFQTAYAKKTGDQKGYREALCKWIDFTRDFLSKYTKTTSIDLSSLRPSSQYKDLGEYYAELNPLLYHISFQRIAEKEIMDAVETGKLYLFQIYNKDFAKGHHGKPNLHTLYWTGLFSPENLAKTSIKLNGQAELFYRPKSRMKRMAHRLGEKMLNKKLKDQKTPIPDTLYQELYDYVNHRLSHDLSDEARALLPNVITKEVSHEIIKDRRFTSDKFFFHVPITLNYQAANSPSKFNQRVNAYLKEHPETPIIGIDRGERNLIYITVIDSTGKILEQRSLNTIQQFDYQKKLDNREKERVAARQAWSVVGTIKDLKQGYLSQVIHEIVDLMIHYQAVVVLENLNFGFKSKRTGIAEKAVYQQFEKMLIDKLNCLVLKDYPAEKVGGVLNPYQLTDQFTSFAKMGTQSGFLFYVPAPYTSKIDPLTGFVDPFVWKTIKNHESRKHFLEGFDFLHYDVKTGDFILHFKMNRNLSFQRGLPGFMPAWDIVFEKNETQFDAKGTPFIAGKRIVPVIENHRFTGRYRDLYPANELIALLEEKGIVFRDGSNILPKLLENDDSHAIDTMVALIRSVLQMRNSNAATGEDYINSPVRDLNGVCFDSRFQNPEWPMDADANGAYHIALKGQLLLNHLKESKDLKLQNGISNQDWLAYIQELRN

SEQ ID NO: 18 - protein, 1228 aa, Unknown
  Lachnospiraceae
MSKLEKFTNCYSLSKTLRFKAIPVGKTQENIDNKRLLVEDEKRAEDYKGVKKLLDRYYLSFINDVLHSIKLKNLNNYISLFRKKTRTEKENKELENLEINLRKEIAKAFKGNEGYKSLFKKDIIETILPEFLDDKDEIALVNSFNGFTTAFTGFFDNRENMFSEEAKSTSIAFRCINENLTRYISNMDIFEKVDAIFDKHEVQEIKEKILNSDYDVEDFFEGEFFNFVLTQEGIDVYNAIIGGFVTESGEKIKGLNEYINLYNQKTKQKLPKFKPLYKQVLSDRESLSFYGEGYTSDEEVLEVFRNTLNKNSEIFSSIKKLEKLFKNFDEYSSAGIFVKNGPAISTISKDIFGEWNVIRDKWNAEYDDIHLKKKAVVTEKYEDDRRKSFKKIGSFSLEQLQEYADADLSVVEKLKEIIIQKVDEIYKVYGSSEKLFDADFVLEKSLKKNDAVVAIMKDLLDSVKSFENYIKAFFGEGKETNRDESFYGDFVLAYDILLKVDHIYDAIRNYVTQKPYSKDKFKLYFQNPQFMGGWDKDKETDYRATILRYGSKYYLAIMDKKYAKCLQKIDKDDVNGNYEKINYKLLPGPNKMLPKVFFSKKWMAYYNPSEDIQKIYKNGTFKKGDMFNLNDCHKLIDFFKDSISRYPKWSNAYDFNFSETEKYKDIAGFYREVEEQGYKVSFESASKKEVDKLVEEGKLYMFQIYNKDFSDKSHGTPNLHTMYFKLLFDENNHGQIRLSGGAELFMRRASLKKEELVVHPANSPIANKNPDNPKKTTTLSYDVYKDKRFSEDQYELHIPIAINKCPKNIFKINTEVRVLLKHDDNPYVIGIDRGERNLLYIVVVDGKGNIVEQYSLNEIINNFNGIRIKTDYHSLLDKKEKERFEARQNWTSIENIKELKAGYISQVVHKICELVEKYDAVIALEDLNSGFKNSRVKVEKQVYQKFEKMLIDKLNYMVDKKSNPCATGGALKGYQITNKFESFKSMSTQNGFIFYIPAWLTSKIDPSTGFVNLLKTKYTSIADSKKFISSFDRIMYVPEEDLFEFALDYKNFSRTDADYIKKWKLYSYGNRIRIFRNPKKNNVFDWEEVCLTSAYKELFNKYGINYQQGDIRALLCEQSDKAFYSSFMALMSLMLQMRNSITGRTDVDFLISPVKNSDGIFYDSRNYEAQENAILPKNADANGAYNIARKVLWAIGQFKKAEDEKLDKVKIAISNKEWLEYAQTSVKH

SEQ ID NO: 19 - protein, 1307 aa, Artificial Sequence
  Synthetic Polypeptide
TQFEGFTNLYQVSKTLRFELIPQGKTLKHIQEQGFIEEDKARNDHYKELKPIIDRIYKTYADQCLQLVQLDWENLSAAIDSYRKEKTEETRNALIEEQATYRNAIHDYFIGRTDNLTDAINKRHAEIYKGLFKAELFNGKVLKQLGTVTTTEHENALLRSFDKFTTYFSGFYENRKNVFSAEDISTAIPHRIVQDNFPKFKENCHIFTRLITAVPSLREHFENVKKAIGIFVSTSIEEVFSFPFYNQLLTQTQIDLYNQLLGGISREAGTEKIKGLNEVLNLAIQKNDETAHIIASLPHRFIPLFKQILSDRNTLSFILEEFKSDEEVIQSFCKYKTLLRNENVLETAEALFNELNSIDLTHIFISHKKLETISSALCDHWDTLRNALYERRISELTGKITKSAKEKVQRSLKHEDINLQEIISAAGKELSEAFKQKTSEILSHAHAALDQPLPTTMLKKQEEKEILKSQLDSLLGLYHLLDWFAVDESNEVDPEFSARLTGIKLEMEPSLSFYNKARNYATKKPYSVEKFKLNFQMPTLASGWDVNKEKNNGAILFVKNGLYYLGIMPKQKGRYKALSFEPTEKTSEGFDKMYYDYFPDAAKMIPKCSTQLKAVTAHFQTHTTPILLSNNFIEPLEITKEIYDLNNPEKEPKKFQTAYAKKTGDQKGYREALCKWIDFTRDFLSKYTKTTSIDLSSLRPSSQYKDLGEYYAELNPLLYHISFQRIAEKEIMDAVETGKLYLFQIYNKDFAKGHHGKPNLHTLYWTGLFSPENLAKTSIKLNGQAELFYRPKSRMKRMAHRLGEKMLNKKLKDQKTPIPDTLYQELYDYVNHRLSHDLSDEARALLPNVITKEVSHEIIKDRRFTSDKFFFHVPITLNYQAANSPSKFNQRVNAYLKEHPETPIIGIDRGEANLIYITVIDSTGKILEQRSLNTIQQFDYQKKLDNREKERVAARQAWSVVGTIKDLKQGYLSQVIHEIVDLMIHYQAVVVLENLNFGFKSKRTGIAEKAVYQQFEKMLIDKLNCLVLKDYPAEKVGGVLNPYQLTDQFTSFAKMGTQSGFLFYVPAPYTSKIDPLTGFVDPFVWKTIKNHESRKHFLEGFDFLHYDVKTGDFILHFKMNRNLSFQRGLPGFMPAWDIVFEKNETQFDAKGTPFIAGKRIVPVIENHRFTGRYRDLYPANELIALLEEKGIVFRDGSNILPKLLENDDSHAIDTMVALIRSVLQMRNSNAATGEDYINSPVRDLNGVCFDSRFQNPEWPMDADANGAYHIALKGQLLLNHLKESKDLKLQNGISNQDWLAYIQELRN

SEQ ID NO: 20 - protein, 1228 aa, Artificial Sequence
  Synthetic Polypeptide
MSKLEKFTNCYSLSKTLRFKAIPVGKTQENIDNKRLLVEDEKRAEDYKGVKKLLDRYYLSFINDVLHSIKLKNLNNYISLFRKKTRTEKENKELENLEINLRKEIAKAFKGNEGYKSLFKKDIIETILPEFLDDKDEIALVNSFNGFTTAFTGFFDNRENMFSEEAKSTSIAFRCINENLTRYISNMDIFEKVDAIFDKHEVQEIKEKILNSDYDVEDFFEGEFFNFVLTQEGIDVYNAIIGGFVTESGEKIKGLNEYINLYNQKTKQKLPKFKPLYKQVLSDRESLSFYGEGYTSDEEVLEVFRNTLNKNSEIFSSIKKLEKLFKNFDEYSSAGIFVKNGPAISTISKDIFGEWNVIRDKWNAEYDDIHLKKKAVVTEKYEDDRRKSFKKIGSFSLEQLQEYADADLSVVEKLKEIIIQKVDEIYKVYGSSEKLFDADFVLEKSLKKNDAVVAIMKDLLDSVKSFENYIKAFFGEGKETNRDESFYGDFVLAYDILLKVDHIYDAIRNYVTQKPYSKDKFKLYFQNPQFMGGWDKDKETDYRATILRYGSKYYLAIMDKKYAKCLQKIDKDDVNGNYEKINYKLLPGPNKMLPKVFFSKKWMAYYNPSEDIQKIYKNGTFKKGDMFNLNDCHKLIDFFKDSISRYPKWSNAYDFNFSETEKYKDIAGFYREVEEQGYKVSFESASKKEVDKLVEEGKLYMFQIYNKDFSDKSHGTPNLHTMYFKLLFDENNHGQIRLSGGAELFMRRASLKKEELVVHPANSPIANKNPDNPKKTTTLSYDVYKDKRFSEDQYELHIPIAINKCPKNIFKINTEVRVLLKHDDNPYVIGIDRGEANLLYIVVVDGKGNIVEQYSLNEIINNFNGIRIKTDYHSLLDKKEKERFEARQNWTSIENIKELKAGYISQVVHKICELVEKYDAVIALEDLNSGFKNSRVKVEKQVYQKFEKMLIDKLNYMVDKKSNPCATGGALKGYQITNKFESFKSMSTQNGFIFYIPAWLTSKIDPSTGFVNLLKTKYTSIADSKKFISSFDRIMYVPEEDLFEFALDYKNFSRTDADYIKKWKLYSYGNRIRIFRNPKKNNVFDWEEVCLTSAYKELFNKYGINYQQGDIRALLCEQSDKAFYSSFMALMSLMLQMRNSITGRTDVDFLISPVKNSDGIFYDSRNYEAQENAILPKNADANGAYNIARKVLWAIGQFKKAEDEKLDKVKIAISNKEWLEYAQTSVKH

SEQ ID NO: 21 - protein, 1228 aa, Artificial Sequence
  Synthetic Polypeptide
MSKLEKFTNCYSLSKTLRFKAIPVGKTQENIDNKRLLVEDEKRAEDYKGVKKLLDRYYLSFINDVLHSIKLKNLNNYISLFRKKTRTEKENKELENLEINLRKEIAKAFKGNEGYKSLFKKDIIETILPEFLDDKDEIALVNSFNGFTTAFTGFFDNRENMFSEEAKSTSIAFRCINENLTRYISNMDIFEKVDAIFDKHEVQEIKEKILNSDYDVEDFFEGEFFNFVLTQEGIDVYNAIIGGFVTESGEKIKGLNEYINLYNQKTKQKLPKFKPLYKQVLSDRESLSFYGEGYTSDEEVLEVFRNTLNKNSEIFSSIKKLEKLFKNFDEYSSAGIFVKNGPAISTISKDIFGEWNVIRDKWNAEYDDIHLKKKAVVTEKYEDDRRKSFKKIGSFSLEQLQEYADADLSVVEKLKEIIIQKVDEIYKVYGSSEKLFDADFVLEKSLKKNDAVVAIMKDLLDSVKSFENYIKAFFGEGKETNRDESFYGDFVLAYDILLKVDHIYDAIRNYVTQKPYSKDKFKLYFQNPQFMGGWDKDKETDYRATILRYGSKYYLAIMDKKYAKCLQKIDKDDVNGNYEKINYKLLPGPNKMLPKVFFSKKWMAYYNPSEDIQKIYKNGTFKKGDMFNLNDCHKLIDFFKDSISRYPKWSNAYDFNFSETEKYKDIAGFYREVEEQGYKVSFESASKKEVDKLVEEGKLYMFQIYNKDFSDKSHGTPNLHTMYFKLLFDENNHGQIRLSGGAELFMRRASLKKEELVVHPANSPIANKNPDNPKKTTTLSYDVYKDKRFSEDQYELHIPIAINKCPKNIFKINTEVRVLLKHDDNPYVIGIDRGERNLLYIVVVDGKGNIVEQYSLNEIINNFNGIRIKTDYHSLLDKKEKERFEARQNWTSIENIKELKAGYISQVVHKICELVEKYDAVIALEDLNSGFKNSRVKVEKQVYQKFEKMLIDKLNYMVDKKSNPCATGGALKGYQITNKFESFKSMSTQNGFIFYIPAWLTSKIDPSTGFVNLLKTKYTSIADSKKFISSFDRIMYVPEEDLFEFALDYKNFSRTDADYIKKWKLYSYGNRIRIFRNPKKNNVFDWEEVCLTSAYKELFNKYGINYQQGDIRALLCEQSDKAFYSSFMALMSLMLQMANSITGRTDVDFLISPVKNSDGIFYDSRNYEAQENAILPKNADANGAYNIARKVLWAIGQFKKAEDEKLDKVKIAISNKEWLEYAQTSVKH

SEQ ID NO: 22 - protein, 1305 aa, Artificial Sequence
  Synthetic Polypeptide
TQFEGFTNLYQVSKTLRFELIPQGKTLKHIQEQGFIEEDKARNDHYKELKPIIDRIYKTYADQCLQLVQLDWENLSAAIDSYRKEKTEETRNALIEEQATYRNAIHDYFIGRTDNLTDAINKRHAEIYKGLFKAELFNGKVLKQLGTVTTTEHENALLRSFDKFTTYFSGFYENRKNVFSAEDISTAIPHRIVQDNFPKFKENCHIFTRLITAVPSLREHFENVKKAIGIFVSTSIEEVFSFPFYNQLLTQTQIDLYNQLLGGISREAGTEKIKGLNEVLNLAIQKNDETAHIIASLPHRFIPLFKQILSDRNTLSFILEEFKSDEEVIQSFCKYKTLLRNENVLETAEALFNELNSIDLTHIFISHKKLETISSALCDHWDTLRNALYERRISELTGKITKSAKEKVQRSLKHEDINLQEIISAAGKELSEAFKQKTSEILSHAHAALDQPLPTTMLKKQEEKEILKSQLDSLLGLYHLLDWFAVDESNEVDPEFSARLTGIKLEMEPSLSFYNKARNYATKKPYSVEKFKLNFQMPTLASGWDVNKEKNNGAILFVKNGLYYLGIMPKQKGRYKALSFEPTEKTSEGFDKMYYDYFPDAAKMIPKCSTQLKAVTAHFQTHTTPILLSNNFIEPLEITKEIYDLNNPEKEPKKFQTAYAKKGQKGYREALCKWIDFTRDFLSKYTKTTSIDLSSLRPSSQYKDLGEYYAELNPLLYHISFQRIAEKEIMDAVETGKLYLFQIYNKDFAKGHHGKPNLHTLYWTGLFSPENLAKTSIKLNGQAELFYRPKSRMKRMAHRLGEKMLNKKLKDQKTPIPDTLYQELYDYVNHRLSHDLSDEARALLPNVITKEVSHEIIKDRRFTSDKFFFHVPITLNYQAANSPSKFNQRVNAYLKEHPETPIIGIDRGERNLIYITVIDSTGKILEQRSLNTIQQFDYQKKLDNREKERVAARQAWSVVGTIKDLKQGYLSQVIHEIVDLMIHYQAVVVLENLNFGFKSKRTGIAEKAVYQQFEKMLIDKLNCLVLKDYPAEKVGGVLNPYQLTDQFTSFAKMGTQSGFLFYVPAPYTSKIDPLTGFVDPFVWKTIKNHESRKHFLEGFDFLHYDVKTGDFILHFKMNRNLSFQRGLPGFMPAWDIVFEKNETQFDAKGTPFIAGKRIVPVIENHRFTGRYRDLYPANELIALLEEKGIVFRDGSNILPKLLENDDSHAIDTMVALIRSVLQMRNSNAATGEDYINSPVRDLNGVCFDSRFQNPEWPMDADANGAYHIALKGQLLLNHLKESKDLKLQNGISNQDWLAYIQELRN

SEQ ID NO: 23 - protein, 1303 aa, Artificial Sequence
  Synthetic Polypeptide
TQFEGFTNLYQVSKTLRFELIPQGKTLKHIQEQGFIEEDKARNDHYKELKPIIDRIYKTYADQCLQLVQLDWENLSAAIDSYRKEKTEETRNALIEEQATYRNAIHDYFIGRTDNLTDAINKRHAEIYKGLFKAELFNGKVLKQLGTVTTTEHENALLRSFDKFTTYFSGFYENRKNVFSAEDISTAIPHRIVQDNFPKFKENCHIFTRLITAVPSLREHFENVKKAIGIFVSTSIEEVFSFPFYNQLLTQTQIDLYNQLLGGISREAGTEKIKGLNEVLNLAIQKNDETAHIIASLPHRFIPLFKQILSDRNTLSFILEEFKSDEEVIQSFCKYKTLLRNENVLETAEALFNELNSIDLTHIFISHKKLETISSALCDHWDTLRNALYERRISELTGKITKSAKEKVQRSLKHEDINLQEIISAAGKELSEAFKQKTSEILSHAHAALDQPLPTTMLKKQEEKEILKSQLDSLLGLYHLLDWFAVDESNEVDPEFSARLTGIKLEMEPSLSFYNKARNYATKKPYSVEKFKLNFQMPTLASGWDVNKEKNNGAILFVKNGLYYLGIMPKQKGRYKALSFEPTEKTSEGFDKMYYDYFPDAAKMIPKCSTQLKAVTAHFQTHTTPILLSNNFIEPLEITKEIYDLNNPEKEPKKFQTAYAKGKGYREALCKWIDFTRDFLSKYTKTTSIDLSSLRPSSQYKDLGEYYAELNPLLYHISFQRIAEKEIMDAVETGKLYLFQIYNKDFAKGHHGKPNLHTLYWTGLFSPENLAKTSIKLNGQAELFYRPKSRMKRMAHRLGEKMLNKKLKDQKTPIPDTLYQELYDYVNHRLSHDLSDEARALLPNVITKEVSHEIIKDRRFTSDKFFFHVPITLNYQAANSPSKFNQRVNAYLKEHPETPIIGIDRGERNLIYITVIDSTGKILEQRSLNTIQQFDYQKKLDNREKERVAARQAWSVVGTIKDLKQGYLSQVIHEIVDLMIHYQAVVVLENLNFGFKSKRTGIAEKAVYQQFEKMLIDKLNCLVLKDYPAEKVGGVLNPYQLTDQFTSFAKMGTQSGFLFYVPAPYTSKIDPLTGFVDPFVWKTIKNHESRKHFLEGFDFLHYDVKTGDFILHFKMNRNLSFQRGLPGFMPAWDIVFEKNETQFDAKGTPFIAGKRIVPVIENHRFTGRYRDLYPANELIALLEEKGIVFRDGSNILPKLLENDDSHAIDTMVALIRSVLQMRNSNAATGEDYINSPVRDLNGVCFDSRFQNPEWPMDADANGAYHIALKGQLLLNHLKESKDLKLQNGISNQDWLAYIQELRN

SEQ ID NO: 24 - protein, 1301 aa, Artificial Sequence
  Synthetic Polypeptide
TQFEGFTNLYQVSKTLRFELIPQGKTLKHIQEQGFIEEDKARNDHYKELKPIIDRIYKTYADQCLQLVQLDWENLSAAIDSYRKEKTEETRNALIEEQATYRNAIHDYFIGRTDNLTDAINKRHAEIYKGLFKAELFNGKVLKQLGTVTTTEHENALLRSFDKFTTYFSGFYENRKNVFSAEDISTAIPHRIVQDNFPKFKENCHIFTRLITAVPSLREHFENVKKAIGIFVSTSIEEVFSFPFYNQLLTQTQIDLYNQLLGGISREAGTEKIKGLNEVLNLAIQKNDETAHIIASLPHRFIPLFKQILSDRNTLSFILEEFKSDEEVIQSFCKYKTLLRNENVLETAEALFNELNSIDLTHIFISHKKLETISSALCDHWDTLRNALYERRISELTGKITKSAKEKVQRSLKHEDINLQEIISAAGKELSEAFKQKTSEILSHAHAALDQPLPTTMLKKQEEKEILKSQLDSLLGLYHLLDWFAVDESNEVDPEFSARLTGIKLEMEPSLSFYNKARNYATKKPYSVEKFKLNFQMPTLASGWDVNKEKNNGAILFVKNGLYYLGIMPKQKGRYKALSFEPTEKTSEGFDKMYYDYFPDAAKMIPKCSTQLKAVTAHFQTHTTPILLSNNFIEPLEITKEIYDLNNPEKEPKKFQTAYAGGYREALCKWIDFTRDFLSKYTKTTSIDLSSLRPSSQYKDLGEYYAELNPLLYHISFQRIAEKEIMDAVETGKLYLFQIYNKDFAKGHHGKPNLHTLYWTGLFSPENLAKTSIKLNGQAELFYRPKSRMKRMAHRLGEKMLNKKLKDQKTPIPDTLYQELYDYVNHRLSHDLSDEARALLPNVITKEVSHEIIKDRRFTSDKFFFHVPITLNYQAANSPSKFNQRVNAYLKEHPETPIIGIDRGERNLIYITVIDSTGKILEQRSLNTIQQFDYQKKLDNREKERVAARQAWSVVGTIKDLKQGYLSQVIHEIVDLMIHYQAVVVLENLNFGFKSKRTGIAEKAVYQQFEKMLIDKLNCLVLKDYPAEKVGGVLNPYQLTDQFTSFAKMGTQSGFLFYVPAPYTSKIDPLTGFVDPFVWKTIKNHESRKHFLEGFDFLHYDVKTGDFILHFKMNRNLSFQRGLPGFMPAWDIVFEKNETQFDAKGTPFIAGKRIVPVIENHRFTGRYRDLYPANELIALLEEKGIVFRDGSNILPKLLENDDSHAIDTMVALIRSVLQMRNSNAATGEDYINSPVRDLNGVCFDSRFQNPEWPMDADANGAYHIALKGQLLLNHLKESKDLKLQNGISNQDWLAYIQELRN

SEQ ID NO: 25 - protein, 887 aa, Natronobacterium gregoryi
MTVIDLDSTTTADELTSGHTYDISVTLTGVYDNTDEQHPRMSLAFEQDNGERRYITLWKNTTPKDVFTYDYATGSTYIFTNIDYEVKDGYENLTATYQTTVENATAQEVGTTDEDETFAGGEPLDHHLDDALNETPDDAETESDSGHVMTSFASRDQLPEWTLHTYTLTATDGAKTDTEYARRTLAYTVRQELYTDHDAAPVATDGLMLLTPEPLGETPLDLDCGVRVEADETRTLDYTTAKDRLLARELVEEGLKRSLWDDYLVRGIDEVLSKEPVLTCDEFDLHERYDLSVEVGHSGRAYLHINFRHRFVPKLTLADIDDDNIYPGLRVKTTYRPRRGHIVWGLRDECATDSLNTLGNQSVVAYHRNNQTPINTDLLDAIEAADRRVVETRRQGHGDDAVSFPQELLAVEPNTHQIKQFASDGFHQQARSKTRLSASRCSEKAQAFAERLDPVRLNGSTVEFSSEFFTGNNEQQLRLLYENGESVLTFRDGARGAHPDETFSKGIVNPPESFEVAVVLPEQQADTCKAQWDTMADLLNQAGAPPTRSETVQYDAFSSPESISLNVAGAIDPSEVDAAFVVLPPDQEGFADLASPTETYDELKKALANMGIYSQMAYFDRFRDAKIFYTRNVALGLLAAAGGVAFTTEHAMPGDADMFIGIDVSRSYPEDGASGQINIAATATAVYKDGTILGHSSTRPQLGEKLQSTDVRDIMKNAILGYQQVTGESPTHIVIHRDGFMNEDLDPATEFLNEQGVEYDIVEIRKQPQTRLLAVSDVQYDTPVKSIAAINQNEPRATVATFGAPEYLATRDGGGLPRPIQIERVAGETDIETLTRQVYLLSQSHIQVHNSTARLPITTAYADQASTHATKGYLVQTGAFESNVGFL

SEQ ID NO: 26 - protein, 1129 aa, Alicyclobacillus acidoterrestris
MAVKSIKVKLRLDDMPEIRAGLWKLHKEVNAGVRYYTEWLSLLRQENLYRRSPNGDGEQECDKTAEECKAELLERLRARQVENGHRGPAGSDDELLQLARQLYELLVPQAIGAKGDAQQIARKFLSPLADKDAVGGLGIAKAGNKPRWVRMREAGEPGWEEEKEKAETRKSADRTADVLRALADFGLKPLMRVYTDSEMSSVEWKPLRKGQAVRTWDRDMFQQAIERMMSWESWNQRVGQEYAKLVEQKNRFEQKNFVGQEHLVHLVNQLQQDMKEASPGLESKEQTAHYVTGRALRGSDKVFEKWGKLAPDAPFDLYDAEIKNVQRRNTRRFGSHDLFAKLAEPEYQALWREDASFLTRYAVYNSILRKLNHAKMFATFTLPDATAHPIWTRFDKLGGNLHQYTFLFNEFGERRHAIRFHKLLKVENGVAREVDDVTVPISMSEQLDNLLPRDPNEPIALYFRDYGAEQHFTGEFGGAKIQCRRDQLAHMHRRRGARDVYLNVSVRVQSQSEARGERRPPYAAVFRLVGDNHRAFVHFDKLSDYLAEHPDDGKLGSEGLLSGLRVMSVDLGLRTSASISVFRVARKDELKPNSKGRVPFFFPIKGNDNLVAVHERSQLLKLPGETESKDLRAIREERQRTLRQLRTQLAYLRLLVRCGSEDVGRRERSWAKLIEQPVDAANHMTPDWREAFENELQKLKSLHGICSDKEWMDAVYESVRRVWRHMGKQVRDWRKDVRSGERPKIRGYAKDVVGGNSIEQIEYLERQYKFLKSWSFFGKVSGQVIRAEKGSRFAITLREHIDHAKEDRLKKLADRIIMEALGYVYALDERGKGKWVAKYPPCQLILLEELSEYQFNNDRPPSENNQLMQWSHRGVFQELINQAQVHDLLVGTMYAAFSSRFDARTGAPGIRCRRVPARCTQEHNPEPFPWWLNKFVVEHTLDACPLRADDLIPTGEGEIFVSPFSAEEGDFHQIHADLNAAQNLQQRLWSDFDISQIRLRCDWGEVDGELVLIPRLTGKRTADSYSNKVFYTNTGVTYYERERGKKRRKVFAQEKLSEEEAELLVEADEAREKSVVLMRDPSGIINRGNWTRQKEFWSMVNQRIEGYLVKQIRSRVPLQDSACENTGDI

SEQ ID NO: 27 - protein, 1389 aa, Leptotrichia shahii
MGNLFGHKRWYEVRDKKDFKIKRKVKVKRNYDGNKYILNINENNNKEKIDNNKFIRKYINYKKNDNILKEFTRKFHAGNILFKLKGKEGIIRIENNDDFLETEEVVLYIEAYGKSEKLKALGITKKKIIDEAIRQGITKDDKKIEIKRQENEEEIEIDIRDEYTNKTLNDCSIILRIIENDELETKKSIYEIFKNINMSLYKIIEKIIENETEKVFENRYYEEHLREKLLKDDKIDVILTNFMEIREKIKSNLEILGFVKFYLNVGGDKKKSKNKKMLVEKILNINVDLTVEDIADFVIKELEFWNITKRIEKVKKVNNEFLEKRRNRTYIKSYVLLDKHEKFKIERENKKDKIVKFFVENIKNNSIKEKIEKILAEFKIDELIKKLEKELKKGNCDTEIFGIFKKHYKVNFDSKKFSKKSDEEKELYKIIYRYLKGRIEKILVNEQKVRLKKMEKIEIEKILNESILSEKILKRVKQYTLEHIMYLGKLRHNDIDMTTVNTDDFSRLHAKEELDLELITFFASTNMELNKIFSRENINNDENIDFFGGDREKNYVLDKKILNSKIKIIRDLDFIDNKNNITNNFIRKFTKIGTNERNRILHAISKERDLQGTQDDYNKVINIIQNLKISDEEVSKALNLDVVFKDKKNIITKINDIKISEENNNDIKYLPSFSKVLPEILNLYRNNPKNEPFDTIETEKIVLNALIYVNKELYKKLILEDDLEENESKNIFLQELKKTLGNIDEIDENIIENYYKNAQISASKGNNKAIKKYQKKVIECYIGYLRKNYEELFDFSDFKMNIQEIKKQIKDINDNKTYERITVKTSDKTIVINDDFEYIISIFALLNSNAVINKIRNRFFATSVWLNTSEYQNIIDILDEIMQLNTLRNECITENWNLNLEEFIQKMKEIEKDFDDFKIQTKKEIFNNYYEDIKNNILTEFKDDINGCDVLEKKLEKIVIFDDETKFEIDKKSNILQDEQRKLSNINKKDLKKKVDQYIKDKDQEIKSKILCRIIFNSDFLKKYKKEIDNLIEDMESENENKFQEIYYPKERKNELYIYKKNLFLNIGNPNFDKIYGLISNDIKMADAKFLFNIDGKNIRKNKISEIDAILKNLNDKLNGYSKEYKEKYIKKLKENDDFFAKNIQNKNYKSFEKDYNRVSEYKKIRDLVEFNYLNKIESYLIDINWKLAIQMARFERDMHYIVNGLRELGIIKLSGYNTGISRAYPKRNGSDGFYTTTAYYKFFDEESYKKFEKICYGFGIDLSENSEINKPENESIRNYISHFYIVRNPFADYSIAEQIDRVSNLLSYSTRYNNSTYASVFEVFKKDVNLDYDELKKKFKLIGNNDILERLMKPKKVSVLELESYNSDYIKNLIIELLTKIENTNDTL

SEQ ID NO: 28 - protein, 1050 aa, Unknown
  Marine metagenome
MRSNYHGGRNARQWRKQISGLARRTKETVFTYKFPLETDAAEIDFDKAVQTYGIAEGVGHGSLIGLVCAFHLSGFRLFSKAGEAMAFRNRSRYPTDAFAEKLSAIMGIQLPTLSPEGLDLIFQSPPRSRDGIAPVWSENEVRNRLYTNWTGRGPANKPDEHLLEIAGEIAKQVFPKFGGWDDLASDPDKALAAADKYFQSQGDFPSIASLPAAIMLSPANSTVDFEGDYIAIDPAAETLLHQAVSRCAARLGRERPDLDQNKGPFVSSLQDALVSSQNNGLSWLFGVGFQHWKEKSPKELIDEYKVPADQHGAVTQVKSFVDAIPLNPLFDTTHYGEFRASVAGKVRSWVANYWKRLLDLKSLLATTEFTLPESISDPKAVSLFSGLLVDPQGLKKVADSLPARLVSAEEAIDRLMGVGIPTAADIAQVERVADEIGAFIGQVQQFNNQVKQKLENLQDADDEEFLKGLKIELPSGDKEPPAINRISGGAPDAAAEISELEEKLQRLLDARSEHFQTISEWAEENAVTLDPIAAMVELERLRLAERGATGDPEEYALRLLLQRIGRLANRVSPVSAGSIRELLKPVFMEEREFNLFFHNRLGSLYRSPYSTSRHQPFSIDVGKAKAIDWIAGLDQISSDIEKALSGAGEALGDQLRDWINLAGFAISQRLRGLPDTVPNALAQVRCPDDVRIPPLLAMLLEEDDIARDVCLKAFNLYVSAINGCLFGALREGFIVRTRFQRIGTDQIHYVPKDKAWEYPDRLNTAKGPINAAVSSDWIEKDGAVIKPVETVRNLSSTGFAGAGVSEYLVQAPHDWYTPLDLRDVAHLVTGLPVEKNITKLKRLTNRTAFRMVGASSFKTHLDSVLLSDKIKLGDFTIIIDQHYRQSVTYGGKVKISYEPERLQVEAAVPVVDTRDRTVPEPDTLFDHIVAIDLGERSVGFAVFDIKSCLRTGEVKPIHDNNGNPVVGTVAVPSIRRLMKAVRSHRRRRQPNQKVNQTYSTALQNYRENVIGDVCNRIDTLMERYNAFPVLEFQIKNFQAGAKQLEIVYGS

SEQ ID NO: 29 - protein, 345 aa, Sulfolobus islandicus
MEVPLYNIFGDNYIIQVATEAENSTIYNNKVEIDDEELRNVLNLAYKIAKNNEDAAAERRGKAKKKKGEEGETTTSNIILPLSGNDKNPWTETLKCYNFPTTVALSEVFKNFSQVKECEEVSAPSFVKPEFYEFGRSPGMVERTRRVKLEVEPHYLIIAAAGWVLTRLGKAKVSEGDYVGVNVFTPTRGILYSLIQNVNGIVPGIKPETAFGLWIARKVVSSVTNPNVSVVRIYTISDAVGQNPTTINGGFSIDLTKLLEKRYLLSERLEAIARNALSISSNMRERYIVLANYIYEYLTGSKRLEDLLYFANRDLIMNLNSDDGKVRDLKLISAYVNGELIRGEG

SEQ ID NO: 30 - protein, 345 aa, Sulfolobus islandicus
MEVPLYNIFGDNYIIQVATEAENSTIYNNKVEIDDEELRNVLNLAYKIAKNNEDAAAERRGKAKKKKGEEGETTTSNIILPLSGNDKNPWTETLKCYNFPTTVALSEVFKNFSQVKECEEVSAPSFVKPEFYKFGRSPGMVERTRRVKLEVEPHYLIMAAAGWVLTRLGKAKVSEGDYVGVNVFTPTRGILYSLIQNVNGIVPGIKPETAFGLWIARKVVSSVTNPNVSVVSIYTISDAVGQNPTTINGGFSIDLTKLLEKRDLLSERLEAIARNALSISSNMRERYIVLANYIYEYLTGSKRLEDLLYFANRDLIMNLNSDDGKVRDLKLISAYVNGELIRGEG

SEQ ID NO: 31 - protein, 1210 aa, Unknown
  Uncultured Parcubacteria group bacterium
MSKRHPRISGVKGYRLHAQRLEYTGKSGAMRTIKYPLYSSPSGGRTVPREIVSAINDDYVGLYGLSNFDDLYNAEKRNEEKVYSVLDFWYDCVQYGAVFSYTAPGLLKNVAEVRGGSYELTKTLKGSHLYDELQIDKVIKFLNKKEISRANGSLDKLKKDIIDCFKAEYRERHKDQCNKLADDIKNAKKDAGASLGERQKKLFRDFFGISEQSENDKPSFTNPLNLTCCLLPFDTVNNNRNRGEVLFNKLKEYAQKLDKNEGSLEMWEYIGIGNSGTAFSNFLGEGFLGRLRENKITELKKAMMDITDAWRGQEQEEELEKRLRILAALTIKLREPKFDNHWGGYRSDINGKLSSWLQNYINQTVKIKEDLKGHKKDLKKAKEMINRFGESDTKEEAVVSSLLESIEKIVPDDSADDEKPDIPAIAIYRRFLSDGRLTLNRFVQREDVQEALIKERLEAEKKKKPKKRKKKSDAEDEKETIDFKELFPHLAKPLKLVPNFYGDSKRELYKKYKNAAIYTDALWKAVEKIYKSAFSSSLKNSFFDTDFDKDFFIKRLQKIFSVYRRFNTDKWKPIVKNSFAPYCDIVSLAENEVLYKPKQSRSRKSAAIDKNRVRLPSTENIAKAGIALARELSVAGFDWKDLLKKEEHEEYIDLIELHKTALALLLAVTETQLDISALDFVENGTVKDFMKTRDGNLVLEGRFLEMFSQSIVFSELRGLAGLMSRKEFITRSAIQTMNGKQAELLYIPHEFQSAKITTPKEMSRAFLDLAPAEFATSLEPESLSEKSLLKLKQMRYYPHYFGYELTRTGQGIDGGVAENALRLEKSPVKKREIKCKQYKTLGRGQNKIVLYVRSSYYQTQFLEWFLHRPKNVQTDVAVSGSFLIDEKKVKTRWNYDALTVALEPVSGSERVFVSQPFTIFPEKSAEEEGQRYLGIDIGEYGIAYTALEITGDSAKILDQNFISDPQLKTLREEVKGLKLDQRRGTFAMPSTKIARIRESLVHSLRNRIHHLALKHKAKIVYELEVSRFEEGKQKIKKVYATLKKADVYSEIDADKNLQTTVWGKLAVASEISASYTSQFCGACKKLWRAEMQVDETITTQELIGTVRVIKGGTLIDAIKDFMRPPIFDENDTPFPKYRDFCDKHHISKKMRGNSCLFICPFCRANADADIQASQTIALLRYVKEEKKVEDYFERFRKLKNIKVLGQMKKI

SEQ ID NO: 32 - protein, 1368 aa, Artificial Sequence; identical to SEQ ID NO: 7
  Synthetic Polypeptide

SEQ ID NO: 33 - protein, 1052 aa, Artificial Sequence
  Synthetic Polypeptide
KRNYILGLDIGITSVGYGIIDYETRDVIDAGVRLFKEANVENNEGRRSKRGARRLKRRRRHRIQRVKKLLFDYNLLTDHSELSGINPYEARVKGLSQKLSEEEFSAALLHLAKRRGVHNVNEVEEDTGNELSTKEQISRNSKALEEKYVAELQLERLKKDGEVRGSINRFKTSDYVKEAKQLLKVQKAYHQLDQSFIDTYIDLLETRRTYYEGPGEGSPFGWKDIKEWYEMLMGHCTYFPEELRSVKYAYNADLYNALNDLNNLVITRDENEKLEYYEKFQIIENVFKQKKKPTLKQIAKEILVNEEDIKGYRVTSTGKPEFTNLKVYHDIKDITARKEIIENAELLDQIAKILTIYQSSEDIQEELTNLNSELTQEEIEQISNLKGYTGTHNLSLKAINLILDELWHTNDNQIAIFNRLKLVPKKVDLSQQKEIPTTLVDDFILSPVVKRSFIQSIKVINAIIKKYGLPNDIIIELAREKNSKDAQKMINEMQKRNRQTNERIEEIIRTTGKENAKYLIEKIKLHDMQEGKCLYSLEAIPLEDLLNNPFNYEVDHIIPRSVSFDNSFNNKVLVKQEENSKKGNRTPFQYLSSSDSKISYETFKKHILNLAKGKGRISKTKKEYLLEERDINRFSVQKDFINRNLVDTRYATRGLMNLLRSYFRVNNLDVKVKSINGGFTSFLRRKWKFKKERNKGYKHHAEDALIIANADFIFKEWKKLDKAKKVMENQMFEEKQAESMPEIETEQEYKEIFITPHQIKHIKDFKDYKYSHRVDKKPNRELINDTLYSTRKDDKGNTLIVNNLNGLYDKDNDKLKKLINKSPEKLLMYHHDPQTYQKLKLIMEQYGDEKNPLYKYYEETGNYLTKYSKKDNGPVIKKIKYYGNKLNAHLDITDDYPNSRNKVVKLSLKPYRFDVYLDNGVYKFVTVKNLDVIKKENYYEVNSKCYEEAKKLKKISNQAEFIASFYNNDLIKINGELYRVIGVNNDLLNRIEVNMIDITYREYLENMNDKRPPRIIKTIASKTQSIKKYSTDILGNLYEVKSKKHPQIIKKG

SEQ ID NO: 34 - protein, 1052 aa, Artificial Sequence
  Synthetic Polypeptide
KRNYILGLAIGITSVGYGIIDYETRDVIDAGVRLFKEANVENNEGRRSKRGARRLKRRRRHRIQRVKKLLFDYNLLTDHSELSGINPYEARVKGLSQKLSEEEFSAALLHLAKRRGVHNVNEVEEDTGNELSTKEQISRNSKALEEKYVAELQLERLKKDGEVRGSINRFKTSDYVKEAKQLLKVQKAYHQLDQSFIDTYIDLLETRRTYYEGPGEGSPFGWKDIKEWYEMLMGHCTYFPEELRSVKYAYNADLYNALNDLNNLVITRDENEKLEYYEKFQIIENVFKQKKKPTLKQIAKEILVNEEDIKGYRVTSTGKPEFTNLKVYHDIKDITARKEIIENAELLDQIAKILTIYQSSEDIQEELTNLNSELTQEEIEQISNLKGYTGTHNLSLKAINLILDELWHTNDNQIAIFNRLKLVPKKVDLSQQKEIPTTLVDDFILSPVVKRSFIQSIKVINAIIKKYGLPNDIIIELAREKNSKDAQKMINEMQKRNRQTNERIEEIIRTTGKENAKYLIEKIKLHDMQEGKCLYSLEAIPLEDLLNNPFNYEVDHIIPRSVSFDNSFNNKVLVKQEENSKKGNRTPFQYLSSSDSKISYETFKKHILNLAKGKGRISKTKKEYLLEERDINRFSVQKDFINRNLVDTRYATRGLMNLLRSYFRVNNLDVKVKSINGGFTSFLRRKWKFKKERNKGYKHHAEDALIIANADFIFKEWKKLDKAKKVMENQMFEEKQAESMPEIETEQEYKEIFITPHQIKHIKDFKDYKYSHRVDKKPNRELINDTLYSTRKDDKGNTLIVNNLNGLYDKDNDKLKKLINKSPEKLLMYHHDPQTYQKLKLIMEQYGDEKNPLYKYYEETGNYLTKYSKKDNGPVIKKIKYYGNKLNAHLDITDDYPNSRNKVVKLSLKPYRFDVYLDNGVYKFVTVKNLDVIKKENYYEVNSKCYEEAKKLKKISNQAEFIASFYNNDLIKINGELYRVIGVNNDLLNRIEVNMIDITYREYLENMNDKRPPRIIKTIASKTQSIKKYSTDILGNLYEVKSKKHPQIIKKG

SEQ ID NO: 35 - protein, 1052 aa, Artificial Sequence
  Synthetic Polypeptide
KRNYILGLDIGITSVGYGIIDYETRDVIDAGVRLFKEANVENNEGRRSKRGARRLKRRRRHRIQRVKKLLFDYNLLTDHSELSGINPYEARVKGLSQKLSEEEFSAALLHLAKRRGVHNVNEVEEDTGNELSTKEQISRNSKALEEKYVAELQLERLKKDGEVRGSINRFKTSDYVKEAKQLLKVQKAYHQLDQSFIDTYIDLLETRRTYYEGPGEGSPFGWKDIKEWYEMLMGHCTYFPEELRSVKYAYNADLYNALNDLNNLVITRDENEKLEYYEKFQIIENVFKQKKKPTLKQIAKEILVNEEDIKGYRVTSTGKPEFTNLKVYHDIKDITARKEIIENAELLDQIAKILTIYQSSEDIQEELTNLNSELTQEEIEQISNLKGYTGTHNLSLKAINLILDELWHTNDNQIAIFNRLKLVPKKVDLSQQKEIPTTLVDDFILSPVVKRSFIQSIKVINAIIKKYGLPNDIIIELAREKNSKDAQKMINEMQKRNRQTNERIEEIIRTTGKENAKYLIEKIKLHDMQEGKCLYSLEAIPLEDLLNNPFNYEVDHIIPRSVSFDNSFNNKVLVKQEEASKKGNRTPFQYLSSSDSKISYETFKKHILNLAKGKGRISKTKKEYLLEERDINRFSVQKDFINRNLVDTRYATRGLMNLLRSYFRVNNLDVKVKSINGGFTSFLRRKWKFKKERNKGYKHHAEDALIIANADFIFKEWKKLDKAKKVMENQMFEEKQAESMPEIETEQEYKEIFITPHQIKHIKDFKDYKYSHRVDKKPNRELINDTLYSTRKDDKGNTLIVNNLNGLYDKDNDKLKKLINKSPEKLLMYHHDPQTYQKLKLIMEQYGDEKNPLYKYYEETGNYLTKYSKKDNGPVIKKIKYYGNKLNAHLDITDDYPNSRNKVVKLSLKPYRFDVYLDNGVYKFVTVKNLDVIKKENYYEVNSKCYEEAKKLKKISNQAEFIASFYNNDLIKINGELYRVIGVNNDLLNRIEVNMIDITYREYLENMNDKRPPRIIKTIASKTQSIKKYSTDILGNLYEVKSKKHPQIIKKG

SEQ ID NO: 36 - protein, 1052 aa, Artificial Sequence
  Synthetic Polypeptide
KRNYILGLDIGITSVGYGIIDYETRDVIDAGVRLFKEANVENNEGRRSKRGARRLKRRRRHRIQRVKKLLFDYNLLTDHSELSGINPYEARVKGLSQKLSEEEFSAALLHLAKRRGVHNVNEVEEDTGNELSTKEQISRNSKALEEKYVAELQLERLKKDGEVRGSINRFKTSDYVKEAKQLLKVQKAYHQLDQSFIDTYIDLLETRRTYYEGPGEGSPFGWKDIKEWYEMLMGHCTYFPEELRSVKYAYNADLYNALNDLNNLVITRDENEKLEYYEKFQIIENVFKQKKKPTLKQIAKEILVNEEDIKGYRVTSTGKPEFTNLKVYHDIKDITARKEIIENAELLDQIAKILTIYQSSEDIQEELTNLNSELTQEEIEQISNLKGYTGTHNLSLKAINLILDELWHTNDNQIAIFNRLKLVPKKVDLSQQKEIPTTLVDDFILSPVVKRSFIQSIKVINAIIKKYGLPNDIIIELAREKNSKDAQKMINEMQKRNRQTNERIEEIIRTTGKENAKYLIEKIKLHDMQEGKCLYSLEAIPLEDLLNNPFNYEVDHIIPRSVSFDNSFNNKVLVKQEEASKKGNRTPFQYLSSSDSKISYETFKKHILNLAKGKGRISKTKKEYLLEERDINRFSVQKDFINRNLVDTRYATRGLMNLLRSYFRVNNLDVKVKSINGGFTSFLRRKWKFKKERNKGYKHHAEDALIIANADFIFKEWKKLDKAKKVMENQMFEEKQAESMPEIETEQEYKEIFITPHQIKHIKDFKDYKYSHRVDKKPNRKLINDTLYSTRKDDKGNTLIVNNLNGLYDKDNDKLKKLINKSPEKLLMYHHDPQTYQKLKLIMEQYGDEKNPLYKYYEETGNYLTKYSKKDNGPVIKKIKYYGNKLNAHLDITDDYPNSRNKVVKLSLKPYRFDVYLDNGVYKFVTVKNLDVIKKENYYEVNSKCYEEAKKLKKISNQAEFIASFYKNDLIKINGELYRVIGVNNDLLNRIEVNMIDITYREYLENMNDKRPPHIIKTIASKTQSIKKYSTDILGNLYEVKSKKHPQIIKKG

SEQ ID NO: 37 - protein, 1367 aa, Artificial Sequence
  Synthetic Polypeptide
DKKYSIGLDIGTNSVGWAVITDEYKVPSKKFKVLGNTDRHSIKKNLIGALLFDSGETAEATRLKRTARRRYTRRKNRICYLQEIFSNEMAKVDDSFFHRLEESFLVEEDKKHERHPIFGNIVDEVAYHEKYPTIYHLRKKLVDSTDKADLRLIYLALAHMIKFRGHFLIEGDLNPDNSDVDKLFIQLVQTYNQLFEENPINASGVDAKAILSARLSKSRRLENLIAQLPGEKKNGLFGNLIALSLGLTPNFKSNFDLAEDAKLQLSKDTYDDDLDNLLAQIGDQYADLFLAAKNLSDAILLSDILRVNTEITKAPLSASMIKRYDEHHQDLTLLKALVRQQLPEKYKEIFFDQSKNGYAGYIDGGASQEEFYKFIKPILEKMDGTEELLVKLNREDLLRKQRTFDNGSIPHQIHLGELHAILRRQEDFYPFLKDNREKIEKILTFRIPYYVGPLARGNSRFAWMTRKSEETITPWNFEEVVDKGASAQSFIERMTNFDKNLPNEKVLPKHSLLYEYFTVYNELTKVKYVTEGMRKPAFLSGEQKKAIVDLLFKTNRKVTVKQLKEDYFKKIECFDSVEISGVEDRFNASLGTYHDLLKIIKDKDFLDNEENEDILEDIVLTLTLFEDREMIEERLKTYAHLFDDKVMKQLKRRRYTGWGRLSRKLINGIRDKQSGKTILDFLKSDGFANRNFMQLIHDDSLTFKEDIQKAQVSGQGDSLHEHIANLAGSPAIKKGILQTVKVVDELVKVMGRHKPENIVIEMARENQTTQKGQKNSRERMKRIEEGIKELGSQILKEHPVENTQLQNEKLYLYYLQNGRDMYVDQELDINRLSDYDVDHIVPQSFLKDDSIDNKVLTRSDKNRGKSDNVPSEEVVKKMKNYWRQLLNAKLITQRKFDNLTKAERGGLSELDKAGFIKRQLVETRQITKHVAQILDSRMNTKYDENDKLIREVKVITLKSKLVSDFRKDFQFYKVREINNYHHAHDAYLNAVVGTALIKKYPKLESEFVYGDYKVYDVRKMIAKSEQEIGKATAKYFFYSNIMNFFKTEITLANGEIRKRPLIETNGETGEIVWDKGRDFATVRKVLSMPQVNIVKKTEVQTGGFSKESILPKRNSDKLIARKKDWDPKKYGGFDSPTVAYSVLVVAKVEKGKSKKLKSVKELLGITIMERSSFEKNPIDFLEAKGYKEVKKDLIIKLPKYSLFELENGRKRMLASAGELQKGNELALPSKYVNFLYLASHYEKLKGSPEDNEQKQLFVEQHKHYLDEIIEQISEFSKRVILADANLDKVLSAYNKHRDKPIREQAENIIHLFTLTNLGAPAAFKYFDTTIDRKRYTSTKEVLDATLIHQSITGLYETRIDLSQLGGD

SEQ ID NO: 38 - protein, 1367 aa, Artificial Sequence
  Synthetic Polypeptide
DKKYSIGLAIGTNSVGWAVITDEYKVPSKKFKVLGNTDRHSIKKNLIGALLFDSGETAEATRLKRTARRRYTRRKNRICYLQEIFSNEMAKVDDSFFHRLEESFLVEEDKKHERHPIFGNIVDEVAYHEKYPTIYHLRKKLVDSTDKADLRLIYLALAHMIKFRGHFLIEGDLNPDNSDVDKLFIQLVQTYNQLFEENPINASGVDAKAILSARLSKSRRLENLIAQLPGEKKNGLFGNLIALSLGLTPNFKSNFDLAEDAKLQLSKDTYDDDLDNLLAQIGDQYADLFLAAKNLSDAILLSDILRVNTEITKAPLSASMIKRYDEHHQDLTLLKALVRQQLPEKYKEIFFDQSKNGYAGYIDGGASQEEFYKFIKPILEKMDGTEELLVKLNREDLLRKQRTFDNGSIPHQIHLGELHAILRRQEDFYPFLKDNREKIEKILTFRIPYYVGPLARGNSRFAWMTRKSEETITPWNFEEVVDKGASAQSFIERMTNFDKNLPNEKVLPKHSLLYEYFTVYNELTKVKYVTEGMRKPAFLSGEQKKAIVDLLFKTNRKVTVKQLKEDYFKKIECFDSVEISGVEDRFNASLGTYHDLLKIIKDKDFLDNEENEDILEDIVLTLTLFEDREMIEERLKTYAHLFDDKVMKQLKRRRYTGWGRLSRKLINGIRDKQSGKTILDFLKSDGFANRNFMQLIHDDSLTFKEDIQKAQVSGQGDSLHEHIANLAGSPAIKKGILQTVKVVDELVKVMGRHKPENIVIEMARENQTTQKGQKNSRERMKRIEEGIKELGSQILKEHPVENTQLQNEKLYLYYLQNGRDMYVDQELDINRLSDYDVDHIVPQSFLKDDSIDNKVLTRSDKNRGKSDNVPSEEVVKKMKNYWRQLLNAKLITQRKFDNLTKAERGGLSELDKAGFIKRQLVETRQITKHVAQILDSRMNTKYDENDKLIREVKVITLKSKLVSDFRKDFQFYKVREINNYHHAHDAYLNAVVGTALIKKYPKLESEFVYGDYKVYDVRKMIAKSEQEIGKATAKYFFYSNIMNFFKTEITLANGEIRKRPLIETNGETGEIVWDKGRDFATVRKVLSMPQVNIVKKTEVQTGGFSKESILPKRNSDKLIARKKDWDPKKYGGFDSPTVAYSVLVVAKVEKGKSKKLKSVKELLGITIMERSSFEKNPIDFLEAKGYKEVKKDLIIKLPKYSLFELENGRKRMLASAGELQKGNELALPSKYVNFLYLASHYEKLKGSPEDNEQKQLFVEQHKHYLDEIIEQISEFSKRVILADANLDKVLSAYNKHRDKPIREQAENIIHLFTLTNLGAPAAFKYFDTTIDRKRYTSTKEVLDATLIHQSITGLYETRIDLSQLGGD

SEQ ID NO: 39 - protein, 1367 aa, Artificial Sequence
  Synthetic Polypeptide
DKKYSIGLAIGTNSVGWAVITDEYKVPSKKFKVLGNTDRHSIKKNLIGALLFDSGETAEATRLKRTARRRYTRRKNRICYLQEIFSNEMAKVDDSFFHRLEESFLVEEDKKHERHPIFGNIVDEVAYHEKYPTIYHLRKKLVDSTDKADLRLIYLALAHMIKFRGHFLIEGDLNPDNSDVDKLFIQLVQTYNQLFEENPINASGVDAKAILSARLSKSRRLENLIAQLPGEKKNGLFGNLIALSLGLTPNFKSNFDLAEDAKLQLSKDTYDDDLDNLLAQIGDQYADLFLAAKNLSDAILLSDILRVNTEITKAPLSASMIKRYDEHHQDLTLLKALVRQQLPEKYKEIFFDQSKNGYAGYIDGGASQEEFYKFIKPILEKMDGTEELLVKLNREDLLRKQRTFDNGSIPHQIHLGELHAILRRQEDFYPFLKDNREKIEKILTFRIPYYVGPLARGNSRFAWMTRKSEETITPWNFEEVVDKGASAQSFIERMTNFDKNLPNEKVLPKHSLLYEYFTVYNELTKVKYVTEGMRKPAFLSGEQKKAIVDLLFKTNRKVTVKQLKEDYFKKIECFDSVEISGVEDRFNASLGTYHDLLKIIKDKDFLDNEENEDILEDIVLTLTLFEDREMIEERLKTYAHLFDDKVMKQLKRRRYTGWGRLSRKLINGIRDKQSGKTILDFLKSDGFANRNFMQLIHDDSLTFKEDIQKAQVSGQGDSLHEHIANLAGSPAIKKGILQTVKVVDELVKVMGRHKPENIVIEMARENQTTQKGQKNSRERMKRIEEGIKELGSQILKEHPVENTQLQNEKLYLYYLQNGRDMYVDQELDINRLSDYDVDHIVPQSFLKDDSIDNKVLTRSDKNRGKSDNVPSEEVVKKMKNYWRQLLNAKLITQRKFDNLTKAERGGLSELDKAGFIKRQLVETRQITKHVAQILDSRMNTKYDENDKLIREVKVITLKSKLVSDFRKDFQFYKVREINNYHHAHDAYLNAVVGTALIKKYPKLESEFVYGDYKVYDVRKMIAKSEQEIGKATAKYFFYSNIMNFFKTEITLANGEIRKRPLIETNGETGEIVWDKGRDFATVRKVLSMPQVNIVKKTEVQTGGFSKESILPKRNSDKLIARKKDWDPKKYGGFESPTVAYSVLVVAKVEKGKSKKLKSVKELLGITIMERSSFEKNPIDFLEAKGYKEVKKDLIIKLPKYSLFELENGRKRMLASAGELQKGNELALPSKYVNFLYLASHYEKLKGSPEDNEQKQLFVEQHKHYLDEIIEQISEFSKRVILADANLDKVLSAYNKHRDKPIREQAENIIHLFTLTNLGAPAAFKYFDTTIDRKQYRSTKEVLDATLIHQSITGLYETRIDLSQLGGD

SEQ ID NO: 40 - protein, 1367 aa, Artificial Sequence
  Synthetic Polypeptide
DKKYSIGLAIGTNSVGWAVITDEYKVPSKKFKVLGNTDRHSIKKNLIGALLFDSGETAEATRLKRTARRRYTRRKNRICYLQEIFSNEMAKVDDSFFHRLEESFLVEEDKKHERHPIFGNIVDEVAYHEKYPTIYHLRKKLVDSTDKADLRLIYLALAHMIKFRGHFLIEGDLNPDNSDVDKLFIQLVQTYNQLFEENPINASGVDAKAILSARLSKSRRLENLIAQLPGEKKNGLFGNLIALSLGLTPNFKSNFDLAEDAKLQLSKDTYDDDLDNLLAQIGDQYADLFLAAKNLSDAILLSDILRVNTEITKAPLSASMIKRYDEHHQDLTLLKALVRQQLPEKYKEIFFDQSKNGYAGYIDGGASQEEFYKFIKPILEKMDGTEELLVKLNREDLLRKQRTFDNGSIPHQIHLGELHAILRRQEDFYPFLKDNREKIEKILTFRIPYYVGPLARGNSRFAWMTRKSEETITPWNFEEVVDKGASAQSFIERMTNFDKNLPNEKVLPKHSLLYEYFTVYNELTKVKYVTEGMRKPAFLSGEQKKAIVDLLFKTNRKVTVKQLKEDYFKKIECFDSVEISGVEDRFNASLGTYHDLLKIIKDKDFLDNEENEDILEDIVLTLTLFEDREMIEERLKTYAHLFDDKVMKQLKRRRYTGWGRLSRKLINGIRDKQSGKTILDFLKSDGFANRNFMQLIHDDSLTFKEDIQKAQVSGQGDSLHEHIANLAGSPAIKKGILQTVKVVDELVKVMGRHKPENIVIEMARENQTTQKGQKNSRERMKRIEEGIKELGSQILKEHPVENTQLQNEKLYLYYLQNGRDMYVDQELDINRLSDYDVDHIVPQSFLKDDSIDNKVLTRSDKNRGKSDNVPSEEVVKKMKNYWRQLLNAKLITQRKFDNLTKAERGGLSELDKAGFIKRQLVETRQITKHVAQILDSRMNTKYDENDKLIREVKVITLKSKLVSDFRKDFQFYKVREINNYHHAHDAYLNAVVGTALIKKYPKLESEFVYGDYKVYDVRKMIAKSEQEIGKATAKYFFYSNIMNFFKTEITLANGEIRKRPLIETNGETGEIVWDKGRDFATVRKVLSMPQVNIVKKTEVQTGGFSKESILPKRNSDKLIARKKDWDPKKYGGFVSPTVAYSVLVVAKVEKGKSKKLKSVKELLGITIMERSSFEKNPIDFLEAKGYKEVKKDLIIKLPKYSLFELENGRKRMLASAGELQKGNELALPSKYVNFLYLASHYEKLKGSPEDNEQKQLFVEQHKHYLDEIIEQISEFSKRVILADANLDKVLSAYNKHRDKPIREQAENIIHLFTLTNLGAPAAFKYFDTTIDRKQYRSTKEVLDATLIHQSITGLYETRIDLSQLGGD

SEQ ID NO: 41 - protein, 1367 aa, Artificial Sequence
  Synthetic Polypeptide
DKKYSIGLAIGTNSVGWAVITDEYKVPSKKFKVLGNTDRHSIKKNLIGALLFDSGETAEATRLKRTARRRYTRRKNRICYLQEIFSNEMAKVDDSFFHRLEESFLVEEDKKHERHPIFGNIVDEVAYHEKYPTIYHLRKKLVDSTDKADLRLIYLALAHMIKFRGHFLIEGDLNPDNSDVDKLFIQLVQTYNQLFEENPINASGVDAKAILSARLSKSRRLENLIAQLPGEKKNGLFGNLIALSLGLTPNFKSNFDLAEDAKLQLSKDTYDDDLDNLLAQIGDQYADLFLAAKNLSDAILLSDILRVNTEITKAPLSASMIKRYDEHHQDLTLLKALVRQQLPEKYKEIFFDQSKNGYAGYIDGGASQEEFYKFIKPILEKMDGTEELLVKLNREDLLRKQRTFDNGSIPHQIHLGELHAILRRQEDFYPFLKDNREKIEKILTFRIPYYVGPLARGNSRFAWMTRKSEETITPWNFEEVVDKGASAQSFIERMTNFDKNLPNEKVLPKHSLLYEYFTVYNELTKVKYVTEGMRKPAFLSGEQKKAIVDLLFKTNRKVTVKQLKEDYFKKIECFDSVEISGVEDRFNASLGTYHDLLKIIKDKDFLDNEENEDILEDIVLTLTLFEDREMIEERLKTYAHLFDDKVMKQLKRRRYTGWGRLSRKLINGIRDKQSGKTILDFLKSDGFANRNFMQLIHDDSLTFKEDIQKAQVSGQGDSLHEHIANLAGSPAIKKGILQTVKVVDELVKVMGRHKPENIVIEMARENQTTQKGQKNSRERMKRIEEGIKELGSQILKEHPVENTQLQNEKLYLYYLQNGRDMYVDQELDINRLSDYDVDHIVPQSFLKDDSIDNKVLTRSDKNRGKSDNVPSEEVVKKMKNYWRQLLNAKLITQRKFDNLTKAERGGLSELDKAGFIKRQLVETRQITKHVAQILDSRMNTKYDENDKLIREVKVITLKSKLVSDFRKDFQFYKVREINNYHHAHDAYLNAVVGTALIKKYPKLESEFVYGDYKVYDVRKMIAKSEQEIGKATAKYFFYSNIMNFFKTEITLANGEIRKRPLIETNGETGEIVWDKGRDFATVRKVLSMPQVNIVKKTEVQTGGFSKESILPKRNSDKLIARKKDWDPKKYGGFVSPTVAYSVLVVAKVEKGKSKKLKSVKELLGITIMERSSFEKNPIDFLEAKGYKEVKKDLIIKLPKYSLFELENGRKRMLASARELQKGNELALPSKYVNFLYLASHYEKLKGSPEDNEQKQLFVEQHKHYLDEIIEQISEFSKRVILADANLDKVLSAYNKHRDKPIREQAENIIHLFTLTNLGAPAAFKYFDTTIDRKEYRSTKEVLDATLIHQSITGLYETRIDLSQLGGD

SEQ ID NO: 42 - protein, 1395 aa, Artificial Sequence
  Synthetic Polypeptide
MSSETGPVAVDPTLRRRIEPHEFEVFFDPRELRKETCLLYEINWGGRHSIWRHTSQNTNKHVEVNFIEKFTTERYFCPNTRCSITWFLSWSPCGECSRAITEFLSRYPHVTLFIYIARLYHHADPRNRQGLRDLISSGVTIQIMTEQESGYCWRNFVNYSPSNEAHWPRYPHLWVRLYVLELYCIILGLPPCLNILRRKQPQLTFFTIALQSCHYQRLPPHILWATGLKSGSETPGTSESATPESKRNYILGLDIGITSVGYGIIDYETRDVIDAGVRLFKEANVENNEGRRSKRGARRLKRRRRHRIQRVKKLLFDYNLLTDHSELSGINPYEARVKGLSQKLSEEEFSAALLHLAKRRGVHNVNEVEEDTGNELSTKEQISRNSKALEEKYVAELQLERLKKDGEVRGSINRFKTSDYVKEAKQLLKVQKAYHQLDQSFIDTYIDLLETRRTYYEGPGEGSPFGWKDIKEWYEMLMGHCTYFPEELRSVKYAYNADLYNALNDLNNLVITRDENEKLEYYEKFQIIENVFKQKKKPTLKQIAKEILVNEEDIKGYRVTSTGKPEFTNLKVYHDIKDITARKEIIENAELLDQIAKILTIYQSSEDIQEELTNLNSELTQEEIEQISNLKGYTGTHNLSLKAINLILDELWHTNDNQIAIFNRLKLVPKKVDLSQQKEIPTTLVDDFILSPVVKRSFIQSIKVINAIIKKYGLPNDIIIELAREKNSKDAQKMINEMQKRNRQTNERIEEIIRTTGKENAKYLIEKIKLHDMQEGKCLYSLEAIPLEDLLNNPFNYEVDHIIPRSVSFDNSFNNKVLVKQEEASKKGNRTPFQYLSSSDSKISYETFKKHILNLAKGKGRISKTKKEYLLEERDINRFSVQKDFINRNLVDTRYATRGLMNLLRSYFRVNNLDVKVKSINGGFTSFLRRKWKFKKERNKGYKHHAEDALIIANADFIFKEWKKLDKAKKVMENQMFEEKQAESMPEIETEQEYKEIFITPHQIKHIKDFKDYKYSHRVDKKPNRELINDTLYSTRKDDKGNTLIVNNLNGLYDKDNDKLKKLINKSPEKLLMYHHDPQTYQKLKLIMEQYGDEKNPLYKYYEETGNYLTKYSKKDNGPVIKKIKYYGNKLNAHLDITDDYPNSRNKVVKLSLKPYRFDVYLDNGVYKFVTVKNLDVIKKENYYEVNSKCYEEAKKLKKISNQAEFIASFYNNDLIKINGELYRVIGVNNDLLNRIEVNMIDITYREYLENMNDKRPPRIIKTIASKTQSIKKYSTDILGNLYEVKSKKHPQIIKKGSGGSTNLSDIIEKETGKQLVIQESILMLPEEVEEVIGNKPESDILVHTAYDESTDENVMLLTSDAPEYKPWALVIQDSNGENKIKMLSGGSPKKKRKV

SEQ ID NO: 43 - protein, 1395 aa, Artificial Sequence
  Synthetic Polypeptide
MSSETGPVAVDPTLRRRIEPHEFEVFFDPRELRKETCLLYEINWGGRHSIWRHTSQNTNKHVEVNFIEKFTTERYFCPNTRCSITWFLSWSPCGECSRAITEFLSRYPHVTLFIYIARLYHHADPRNRQGLRDLISSGVTIQIMTEQESGYCWRNFVNYSPSNEAHWPRYPHLWVRLYVLELYCIILGLPPCLNILRRKQPQLTFFTIALQSCHYQRLPPHILWATGLKSGSETPGTSESATPESKRNYILGLDIGITSVGYGIIDYETRDVIDAGVRLFKEANVENNEGRRSKRGARRLKRRRRHRIQRVKKLLFDYNLLTDHSELSGINPYEARVKGLSQKLSEEEFSAALLHLAKRRGVHNVNEVEEDTGNELSTKEQISRNSKALEEKYVAELQLERLKKDGEVRGSINRFKTSDYVKEAKQLLKVQKAYHQLDQSFIDTYIDLLETRRTYYEGPGEGSPFGWKDIKEWYEMLMGHCTYFPEELRSVKYAYNADLYNALNDLNNLVITRDENEKLEYYEKFQIIENVFKQKKKPTLKQIAKEILVNEEDIKGYRVTSTGKPEFTNLKVYHDIKDITARKEIIENAELLDQIAKILTIYQSSEDIQEELTNLNSELTQEEIEQISNLKGYTGTHNLSLKAINLILDELWHTNDNQIAIFNRLKLVPKKVDLSQQKEIPTTLVDDFILSPVVKRSFIQSIKVINAIIKKYGLPNDIIIELAREKNSKDAQKMINEMQKRNRQTNERIEEIIRTTGKENAKYLIEKIKLHDMQEGKCLYSLEAIPLEDLLNNPFNYEVDHIIPRSVSFDNSFNNKVLVKQEEASKKGNRTPFQYLSSSDSKISYETFKKHILNLAKGKGRISKTKKEYLLEERDINRFSVQKDFINRNLVDTRYATRGLMNLLRSYFRVNNLDVKVKSINGGFTSFLRRKWKFKKERNKGYKHHAEDALIIANADFIFKEWKKLDKAKKVMENQMFEEKQAESMPEIETEQEYKEIFITPHQIKHIKDFKDYKYSHRVDKKPNRKLINDTLYSTRKDDKGNTLIVNNLNGLYDKDNDKLKKLINKSPEKLLMYHHDPQTYQKLKLIMEQYGDEKNPLYKYYEETGNYLTKYSKKDNGPVIKKIKYYGNKLNAHLDITDDYPNSRNKVVKLSLKPYRFDVYLDNGVYKFVTVKNLDVIKKENYYEVNSKCYEEAKKLKKISNQAEFIASFYKNDLIKINGELYRVIGVNNDLLNRIEVNMIDITYREYLENMNDKRPPHIIKTIASKTQSIKKYSTDILGNLYEVKSKKHPQIIKKGSGGSTNLSDIIEKETGKQLVIQESILMLPEEVEEVIGNKPESDILVHTAYDESTDENVMLLTSDAPEYKPWALVIQDSNGENKIKMLSGGSPKKKRKV

SEQ ID NO: 44 - protein, 1710 aa, Artificial Sequence
  Synthetic Polypeptide
MSSETGPVAVDPTLRRRIEPHEFEVFFDPRELRKETCLLYEINWGGRHSIWRHTSQNTNKHVEVNFIEKFTTERYFCPNTRCSITWFLSWSPCGECSRAITEFLSRYPHVTLFIYIARLYHHADPRNRQGLRDLISSGVTIQIMTEQESGYCWRNFVNYSPSNEAHWPRYPHLWVRLYVLELYCIILGLPPCLNILRRKQPQLTFFTIALQSCHYQRLPPHILWATGLKSGSETPGTSESATPESDKKYSIGLAIGTNSVGWAVITDEYKVPSKKFKVLGNTDRHSIKKNLIGALLFDSGETAEATRLKRTARRRYTRRKNRICYLQEIFSNEMAKVDDSFFHRLEESFLVEEDKKHERHPIFGNIVDEVAYHEKYPTIYHLRKKLVDSTDKADLRLIYLALAHMIKFRGHFLIEGDLNPDNSDVDKLFIQLVQTYNQLFEENPINASGVDAKAILSARLSKSRRLENLIAQLPGEKKNGLFGNLIALSLGLTPNFKSNFDLAEDAKLQLSKDTYDDDLDNLLAQIGDQYADLFLAAKNLSDAILLSDILRVNTEITKAPLSASMIKRYDEHHQDLTLLKALVRQQLPEKYKEIFFDQSKNGYAGYIDGGASQEEFYKFIKPILEKMDGTEELLVKLNREDLLRKQRTFDNGSIPHQIHLGELHAILRRQEDFYPFLKDNREKIEKILTFRIPYYVGPLARGNSRFAWMTRKSEETITPWNFEEVVDKGASAQSFIERMTNFDKNLPNEKVLPKHSLLYEYFTVYNELTKVKYVTEGMRKPAFLSGEQKKAIVDLLFKTNRKVTVKQLKEDYFKKIECFDSVEISGVEDRFNASLGTYHDLLKIIKDKDFLDNEENEDILEDIVLTLTLFEDREMIEERLKTYAHLFDDKVMKQLKRRRYTGWGRLSRKLINGIRDKQSGKTILDFLKSDGFANRNFMQLIHDDSLTFKEDIQKAQVSGQGDSLHEHIANLAGSPAIKKGILQTVKVVDELVKVMGRHKPENIVIEMARENQTTQKGQKNSRERMKRIEEGIKELGSQILKEHPVENTQLQNEKLYLYYLQNGRDMYVDQELDINRLSDYDVDHIVPQSFLKDDSIDNKVLTRSDKNRGKSDNVPSEEVVKKMKNYWRQLLNAKLITQRKFDNLTKAERGGLSELDKAGFIKRQLVETRQITKHVAQILDSRMNTKYDENDKLIREVKVITLKSKLVSDFRKDFQFYKVREINNYHHAHDAYLNAVVGTALIKKYPKLESEFVYGDYKVYDVRKMIAKSEQEIGKATAKYFFYSNIMNFFKTEITLANGEIRKRPLIETNGETGEIVWDKGRDFATVRKVLSMPQVNIVKKTEVQTGGFSKESILPKRNSDKLIARKKDWDPKKYGGFESPTVAYSVLVVAKVEKGKSKKLKSVKELLGITIMERSSFEKNPIDFLEAKGYKEVKKDLIIKLPKYSLFELENGRKRMLASAGELQKGNELALPSKYVNFLYLASHYEKLKGSPEDNEQKQLFVEQHKHYLDEIIEQISEFSKRVILADANLDKVLSAYNKHRDKPIREQAENIIHLFTLTNLGAPAAFKYFDTTIDRKQYRSTKEVLDATLIHQSITGLYETRIDLSQLGGDSGGSTNLSDIIEKETGKQLVIQESILMLPEEVEEVIGNKPESDILVHTAYDESTDENVMLLTSDAPEYKPWALVIQDSNGENKIKMLSGGSPKKKRKV

SEQ ID NO: 45 - protein, 1710 aa, Artificial Sequence
  Synthetic Polypeptide
MSSETGPVAVDPTLRRRIEPHEFEVFFDPRELRKETCLLYEINWGGRHSIWRHTSQNTNKHVEVNFIEKFTTERYFCPNTRCSITWFLSWSPCGECSRAITEFLSRYPHVTLFIYIARLYHHADPRNRQGLRDLISSGVTIQIMTEQESGYCWRNFVNYSPSNEAHWPRYPHLWVRLYVLELYCIILGLPPCLNILRRKQPQLTFFTIALQSCHYQRLPPHILWATGLKSGSETPGTSESATPESDKKYSIGLAIGTNSVGWAVITDEYKVPSKKFKVLGNTDRHSIKKNLIGALLFDSGETAEATRLKRTARRRYTRRKNRICYLQEIFSNEMAKVDDSFFHRLEESFLVEEDKKHERHPIFGNIVDEVAYHEKYPTIYHLRKKLVDSTDKADLRLIYLALAHMIKFRGHFLIEGDLNPDNSDVDKLFIQLVQTYNQLFEENPINASGVDAKAILSARLSKSRRLENLIAQLPGEKKNGLFGNLIALSLGLTPNFKSNFDLAEDAKLQLSKDTYDDDLDNLLAQIGDQYADLFLAAKNLSDAILLSDILRVNTEITKAPLSASMIKRYDEHHQDLTLLKALVRQQLPEKYKEIFFDQSKNGYAGYIDGGASQEEFYKFIKPILEKMDGTEELLVKLNREDLLRKQRTFDNGSIPHQIHLGELHAILRRQEDFYPFLKDNREKIEKILTFRIPYYVGPLARGNSRFAWMTRKSEETITPWNFEEVVDKGASAQSFIERMTNFDKNLPNEKVLPKHSLLYEYFTVYNELTKVKYVTEGMRKPAFLSGEQKKAIVDLLFKTNRKVTVKQLKEDYFKKIECFDSVEISGVEDRFNASLGTYHDLLKIIKDKDFLDNEENEDILEDIVLTLTLFEDREMIEERLKTYAHLFDDKVMKQLKRRRYTGWGRLSRKLINGIRDKQSGKTILDFLKSDGFANRNFMQLIHDDSLTFKEDIQKAQVSGQGDSLHEHIANLAGSPAIKKGILQTVKVVDELVKVMGRHKPENIVIEMARENQTTQKGQKNSRERMKRIEEGIKELGSQILKEHPVENTQLQNEKLYLYYLQNGRDMYVDQELDINRLSDYDVDHIVPQSFLKDDSIDNKVLTRSDKNRGKSDNVPSEEVVKKMKNYWRQLLNAKLITQRKFDNLTKAERGGLSELDKAGFIKRQLVETRQITKHVAQILDSRMNTKYDENDKLIREVKVITLKSKLVSDFRKDFQFYKVREINNYHHAHDAYLNAVVGTALIKKYPKLESEFVYGDYKVYDVRKMIAKSEQEIGKATAKYFFYSNIMNFFKTEITLANGEIRKRPLIETNGETGEIVWDKGRDFATVRKVLSMPQVNIVKKTEVQTGGFSKESILPKRNSDKLIARKKDWDPKKYGGFVSPTVAYSVLVVAKVEKGKSKKLKSVKELLGITIMERSSFEKNPIDFLEAKGYKEVKKDLIIKLPKYSLFELENGRKRMLASAGELQKGNELALPSKYVNFLYLASHYEKLKGSPEDNEQKQLFVEQHKHYLDEIIEQISEFSKRVILADANLDKVLSAYNKHRDKPIREQAENIIHLFTLTNLGAPAAFKYFDTTIDRKQYRSTKEVLDATLIHQSITGLYETRIDLSQLGGDSGGSTNLSDIIEKETGKQLVIQESILMLPEEVEEVIGNKPESDILVHTAYDESTDENVMLLTSDAPEYKPWALVIQDSNGENKIKMLSGGSPKKKRKV

SEQ ID NO: 46 - protein, 1710 aa, Artificial Sequence
  Synthetic Polypeptide
MSSETGPVAVDPTLRRRIEPHEFEVFFDPRELRKETCLLYEINWGGRHSIWRHTSQNTNKHVEVNFIEKFTTERYFCPNTRCSITWFLSWSPCGECSRAITEFLSRYPHVTLFIYIARLYHHADPRNRQGLRDLISSGVTIQIMTEQESGYCWRNFVNYSPSNEAHWPRYPHLWVRLYVLELYCIILGLPPCLNILRRKQPQLTFFTIALQSCHYQRLPPHILWATGLKSGSETPGTSESATPESDKKYSIGLAIGTNSVGWAVITDEYKVPSKKFKVLGNTDRHSIKKNLIGALLFDSGETAEATRLKRTARRRYTRRKNRICYLQEIFSNEMAKVDDSFFHRLEESFLVEEDKKHERHPIFGNIVDEVAYHEKYPTIYHLRKKLVDSTDKADLRLIYLALAHMIKFRGHFLIEGDLNPDNSDVDKLFIQLVQTYNQLFEENPINASGVDAKAILSARLSKSRRLENLIAQLPGEKKNGLFGNLIALSLGLTPNFKSNFDLAEDAKLQLSKDTYDDDLDNLLAQIGDQYADLFLAAKNLSDAILLSDILRVNTEITKAPLSASMIKRYDEHHQDLTLLKALVRQQLPEKYKEIFFDQSKNGYAGYIDGGASQEEFYKFIKPILEKMDGTEELLVKLNREDLLRKQRTFDNGSIPHQIHLGELHAILRRQEDFYPFLKDNREKIEKILTFRIPYYVGPLARGNSRFAWMTRKSEETITPWNFEEVVDKGASAQSFIERMTNFDKNLPNEKVLPKHSLLYEYFTVYNELTKVKYVTEGMRKPAFLSGEQKKAIVDLLFKTNRKVTVKQLKEDYFKKIECFDSVEISGVEDRFNASLGTYHDLLKIIKDKDFLDNEENEDILEDIVLTLTLFEDREMIEERLKTYAHLFDDKVMKQLKRRRYTGWGRLSRKLINGIRDKQSGKTILDFLKSDGFANRNFMQLIHDDSLTFKEDIQKAQVSGQGDSLHEHIANLAGSPAIKKGILQTVKVVDELVKVMGRHKPENIVIEMARENQTTQKGQKNSRERMKRIEEGIKELGSQILKEHPVENTQLQNEKLYLYYLQNGRDMYVDQELDINRLSDYDVDHIVPQSFLKDDSIDNKVLTRSDKNRGKSDNVPSEEVVKKMKNYWRQLLNAKLITQRKFDNLTKAERGGLSELDKAGFIKRQLVETRQITKHVAQILDSRMNTKYDENDKLIREVKVITLKSKLVSDFRKDFQFYKVREINNYHHAHDAYLNAVVGTALIKKYPKLESEFVYGDYKVYDVRKMIAKSEQEIGKATAKYFFYSNIMNFFKTEITLANGEIRKRPLIETNGETGEIVWDKGRDFATVRKVLSMPQVNIVKKTEVQTGGFSKESILPKRNSDKLIARKKDWDPKKYGGFVSPTVAYSVLVVAKVEKGKSKKLKSVKELLGITIMERSSFEKNPIDFLEAKGYKEVKKDLIIKLPKYSLFELENGRKRMLASARELQKGNELALPSKYVNFLYLASHYEKLKGSPEDNEQKQLFVEQHKHYLDEIIEQISEFSKRVILADANLDKVLSAYNKHRDKPIREQAENIIHLFTLTNLGAPAAFKYFDTTIDRKEYRSTKEVLDATLIHQSITGLYETRIDLSQLGGDSGGSTNLSDIIEKETGKQLVIQESILMLPEEVEEVIGNKPESDILVHTAYDESTDENVMLLTSDAPEYKPWALVIQDSNGENKIKMLSGGSPKKKRKV

SEQ ID NO: 47 - protein, 1367 aa, Artificial Sequence
  Synthetic Polypeptide
DKKYSIGLAIGTNSVGWAVITDEYKVPSKKFKVLGNTDRHSIKKNLIGALLFDSGETAEATRLKRTARRRYTRRKNRICYLQEIFSNEMAKVDDSFFHRLEESFLVEEDKKHERHPIFGNIVDEVAYHEKYPTIYHLRKKLVDSTDKADLRLIYLALAHMIKFRGHFLIEGDLNPDNSDVDKLFIQLVQTYNQLFEENPINASGVDAKAILSARLSKSRRLENLIAQLPGEKKNGLFGNLIALSLGLTPNFKSNFDLAEDAKLQLSKDTYDDDLDNLLAQIGDQYADLFLAAKNLSDAILLSDILRVNTEITKAPLSASMIKRYDEHHQDLTLLKALVRQQLPEKYKEIFFDQSKNGYAGYIDGGASQEEFYKFIKPILEKMDGTEELLVKLNREDLLRKQRTFDNGSIPHQIHLGELHAILRRQEDFYPFLKDNREKIEKILTFRIPYYVGPLARGNSRFAWMTRKSEETITPWNFEEVVDKGASAQSFIERMTAFDKNLPNEKVLPKHSLLYEYFTVYNELTKVKYVTEGMRKPAFLSGEQKKAIVDLLFKTNRKVTVKQLKEDYFKKIECFDSVEISGVEDRFNASLGTYHDLLKIIKDKDFLDNEENEDILEDIVLTLTLFEDREMIEERLKTYAHLFDDKVMKQLKRRRYTGWGALSRKLINGIRDKQSGKTILDFLKSDGFANRNFMALIHDDSLTFKEDIQKAQVSGQGDSLHEHIANLAGSPAIKKGILQTVKVVDELVKVMGRHKPENIVIEMARENQTTQKGQKNSRERMKRIEEGIKELGSQILKEHPVENTQLQNEKLYLYYLQNGRDMYVDQELDINRLSDYDVDHIVPQSFLKDDSIDNKVLTRSDKNRGKSDNVPSEEVVKKMKNYWRQLLNAKLITQRKFDNLTKAERGGLSELDKAGFIKRQLVETRAITKHVAQILDSRMNTKYDENDKLIREVKVITLKSKLVSDFRKDFQFYKVREINNYHHAHDAYLNAVVGTALIKKYPKLESEFVYGDYKVYDVRKMIAKSEQEIGKATAKYFFYSNIMNFFKTEITLANGEIRKRPLIETNGETGEIVWDKGRDFATVRKVLSMPQVNIVKKTEVQTGGFSKESILPKRNSDKLIARKKDWDPKKYGGFDSPTVAYSVLVVAKVEKGKSKKLKSVKELLGITIMERSSFEKNPIDFLEAKGYKEVKKDLIIKLPKYSLFELENGRKRMLASAGELQKGNELALPSKYVNFLYLASHYEKLKGSPEDNEQKQLFVEQHKHYLDEIIEQISEFSKRVILADANLDKVLSAYNKHRDKPIREQAENIIHLFTLTNLGAPAAFKYFDTTIDRKRYTSTKEVLDATLIHQSITGLYETRIDLSQLGGD

SEQ ID NO: 48 - protein, 1612 aa, Artificial Sequence
  Synthetic Polypeptide
MSSETGPVAVDPTLRRRIEPHEFEVFFDPRELRKETCLLYEINWGGRHSIWRHTSQNTNKHVEVNFIEKFTTERYFCPNTRCSITWFLSWSPCGECSRAITEFLSRYPHVTLFIYIARLYHHADPRNRQGLRDLISSGVTIQIMTEQESGYCWRNFVNYSPSNEAHWPRYPHLWVRLYVLELYCIILGLPPCLNILRRKQPQLTFFTIALQSCHYQRLPPHILWATGLKSGSETPGTSESATPESDKKYSIGLAIGTNSVGWAVITDEYKVPSKKFKVLGNTDRHSIKKNLIGALLFDSGETAEATRLKRTARRRYTRRKNRICYLQEIFSNEMAKVDDSFFHRLEESFLVEEDKKHERHPIFGNIVDEVAYHEKYPTIYHLRKKLVDSTDKADLRLIYLALAHMIKFRGHFLIEGDLNPDNSDVDKLFIQLVQTYNQLFEENPINASGVDAKAILSARLSKSRRLENLIAQLPGEKKNGLFGNLIALSLGLTPNFKSNFDLAEDAKLQLSKDTYDDDLDNLLAQIGDQYADLFLAAKNLSDAILLSDILRVNTEITKAPLSASMIKRYDEHHQDLTLLKALVRQQLPEKYKEIFFDQSKNGYAGYIDGGASQEEFYKFIKPILEKMDGTEELLVKLNREDLLRKQRTFDNGSIPHQIHLGELHAILRRQEDFYPFLKDNREKIEKILTFRIPYYVGPLARGNSRFAWMTRKSEETITPWNFEEVVDKGASAQSFIERMTAFDKNLPNEKVLPKHSLLYEYFTVYNELTKVKYVTEGMRKPAFLSGEQKKAIVDLLFKTNRKVTVKQLKEDYFKKIECFDSVEISGVEDRFNASLGTYHDLLKIIKDKDFLDNEENEDILEDIVLTLTLFEDREMIEERLKTYAHLFDDKVMKQLKRRRYTGWGALSRKLINGIRDKQSGKTILDFLKSDGFANRNFMALIHDDSLTFKEDIQKAQVSGQGDSLHEHIANLAGSPAIKKGILQTVKVVDELVKVMGRHKPENIVIEMARENQTTQKGQKNSRERMKRIEEGIKELGSQILKEHPVENTQLQNEKLYLYYLQNGRDMYVDQELDINRLSDYDVDHIVPQSFLKDDSIDNKVLTRSDKNRGKSDNVPSEEVVKKMKNYWRQLLNAKLITQRKFDNLTKAERGGLSELDKAGFIKRQLVETRAITKHVAQILDSRMNTKYDENDKLIREVKVITLKSKLVSDFRKDFQFYKVREINNYHHAHDAYLNAVVGTALIKKYPKLESEFVYGDYKVYDVRKMIAKSEQEIGKATAKYFFYSNIMNFFKTEITLANGEIRKRPLIETNGETGEIVWDKGRDFATVRKVLSMPQVNIVKKTEVQTGGFSKESILPKRNSDKLIARKKDWDPKKYGGFDSPTVAYSVLVVAKVEKGKSKKLKSVKELLGITIMERSSFEKNPIDFLEAKGYKEVKKDLIIKLPKYSLFELENGRKRMLASAGELQKGNELALPSKYVNFLYLASHYEKLKGSPEDNEQKQLFVEQHKHYLDEIIEQISEFSKRVILADANLDKVLSAYNKHRDKPIREQAENIIHLFTLTNLGAPAAFKYFDTTIDRKRYTSTKEVLDATLIHQSITGLYETRIDLSQLGGD

SEQ ID NO: 49 - protein, 198 aa, Homo sapiens [sequence omitted]

SEQ ID NO: 50 - protein, 181 aa, Homo sapiens
MDSLLMNRRKFLYQFKNVRWAKGRRETYLCYVVKRRDSATSFSLDFGYLRNKNGCHVELLFLRYISDWDLDPGRCYRVTWFTSWSPCYDCARHVADFLRGNPNLSLRIFTARLYFCEDRKAEPEGLRRLHRAGVQIAIMTFKDYFYCWNTFVENHERTFKAWEGLHENSVRLSRQLRRILL

SEQ ID NO: 51 - protein, 198 aa, Mus musculus
MDSLLMKQKKFLYHFKNVRWAKGRHETYLCYVVKRRDSATSCSLDFGHLRNKSGCHVELLFLRYISDWDLDPGRCYRVTWFTSWSPCYDCARHVAEFLRWNPNLSLRIFTARLYFCEDRKAEPEGLRRLHRAGVQIGIMTFKDYFYCWNTFVENRERTFKAWEGLHENSVRLTRQLRRILLPLYEVDDLRDAFRMLGF

SEQ ID NO: 52 - protein, 198 aa, Canis lupus familiaris
MDSLLMKQRKFLYHFKNVRWAKGRHETYLCYVVKRRDSATSFSLDFGHLRNKSGCHVELLFLRYISDWDLDPGRCYRVTWFTSWSPCYDCARHVADFLRGYPNLSLRIFAARLYFCEDRKAEPEGLRRLHRAGVQIAIMTFKDYFYCWNTFVENREKTFKAWEGLHENSVRLSRQLRRILLPLYEVDDLRDAFRTLGL

SEQ ID NO: 53 - protein, 199 aa, Bos taurus
MDSLLKKQRQFLYQFKNVRWAKGRHETYLCYVVKRRDSPTSFSLDFGHLRNKAGCHVELLFLRYISDWDLDPGRCYRVTWFTSWSPCYDCARHVADFLRGYPNLSLRIFTARLYFCDKERKAEPEGLRRLHRAGVQIAIMTFKDYFYCWNTFVENHERTFKAWEGLHENSVRLSRQLRRILLPLYEVDDLRDAFRTLGL

SEQ ID NO: 54 - protein, 239 aa, Rattus norvegicus
MAVGSKPKAALVGPHWERERIWCFLCSTGLGTQQTGQTSRWLRPAATQDPVSPPRSLLMKQRKFLYHFKNVRWAKGRHETYLCYVVKRRDSATSFSLDFGYLRNKSGCHVELLFLRYISDWDLDPGRCYRVTWFTSWSPCYDCARHVADFLRGNPNLSLRIFTARLTGWGALPAGLMSPARPSDYFYCWNTFVENHERTFKAWEGLHENSVRLSRRLRRILLPLYEVDDLRDAFRTLGL

SEQ ID NO: 55 - protein, 429 aa, Mus musculus
MGPFCLGCSHRKCYSPIRNLISQETFKFHFKNLGYAKGRKDTFLCYEVTRKDCDSPVSLHHGVFKNKDNIHAEICFLYWFHDKVLKVLSPREEFKITWYMSWSPCFECAEQIVRFLATHHNLSLDIFSSRLYNVQDPETQQNLCRLVQEGAQVAAMDLYEFKKCWKKFVDNGGRRFRPWKRLLTNFRYQDSKLQEILRPCYIPVPSSSSSTLSNICLTKGLPETRFCVEGRRMDPLSEEEFYSQFYNQRVKHLCYYHRMKPYLCYQLEQFNGQAPLKGCLLSEKGKQHAEILFLDKIRSMELSQVTITCYLTWSPCPNCAWQLAAFKRDRPDLILHIYTSRLYFHWKRPFQKGLCSLWQSGILVDVMDLPQFTDCWTNFVNPKRPFWPWKGLEIISRRTQRRLRRIKESWGLQDLVNDFGNLQLGPPMS

SEQ ID NO: 56 - protein, 429 aa, Rattus norvegicus
MGPFCLGCSHRKCYSPIRNLISQETFKFHFKNLRYAIDRKDTFLCYEVTRKDCDSPVSLHHGVFKNKDNIHAEICFLYWFHDKVLKVLSPREEFKITWYMSWSPCFECAEQVLRFLATHHNLSLDIFSSRLYNIRDPENQQNLCRLVQEGAQVAAMDLYEFKKCWKKFVDNGGRRFRPWKKLLTNFRYQDSKLQEILRPCYIPVPSSSSSTLSNICLTKGLPETRFCVERRRVHLLSEEEFYSQFYNQRVKHLCYYHGVKPYLCYQLEQFNGQAPLKGCLLSEKGKQHAEILFLDKIRSMELSQVIITCYLTWSPCPNCAWQLAAFKRDRPDLILHIYTSRLYFHWKRPFQKGLCSLWQSGILVDVMDLPQFTDCWTNFVNPKRPFWPWKGLEIISRRTQRRLHRIKESWGLQDLVNDFGNLQLGPPMS

SEQ ID NO: 57 - protein, 370 aa, Macaca mulatta
MVEPMDPRTFVSNFNNRPILSGLNTVWLCCEVKTKDPSGPPLDAKIFQGKVYSKAKYHPEMRFLRWFHKWRQLHHDQEYKVTWYVSWSPCTRCANSVATFLAKDPKVTLTIFVARLYYFWKPDYQQALRILCQKRGGPHATMKIMNYNEFQDCWNKFVDGRGKPFKPRNNLPKHYTLLQATLGELLRHLMDPGTFTSNFNNKPWVSGQHETYLCYKVERLHNDTWVPLNQHRGFLRNQAPNIHGFPKGRHAELCFLDLIPFWKLDGQQYRVTCFTSWSPCFSCAQEMAKFISNNEHVSLCIFAARIYDDQGRYQEGLRALHRDGAKIAMMNYSEFEYCWDTFVDRQGRPFQPWDGLDEHSQALSGRLRAI

SEQ ID NO: 58 - protein, 384 aa, Pan troglodytes
MKPHFRNPVERMYQDTFSDNFYNRPILSHRNTVWLCYEVKTKGPSRPPLDAKIFRGQVYSKLKYHPEMRFFHWFSKWRKLHRDQEYEVTWYISWSPCTKCTRDVATFLAEDPKVTLTIFVARLYYFWDPDYQEALRSLCQKRDGPRATMKIMNYDEFQHCWSKFVYSQRELFEPWNNLPKYYILLHIMLGEILRHSMDPPTFTSNFNNELWVRGRHETYLCYEVERLHNDTWVLLNQRRGFLCNQAPHKHGFLEGRHAELCFLDVIPFWKLDLHQDYRVTCFTSWSPCFSCAQEMAKFISNNKHVSLCIFAARIYDDQGRCQEGLRTLAKAGAKISIMTYSEFKHCWDTFVDHQGCPFQPWDGLEEHSQALSGRLRAILQNQGN

SEQ ID NO: 59 - protein, 377 aa, Chlorocebus sabaeus
MNPQIRNMVEQMEPDIFVYYFNNRPILSGRNTVWLCYEVKTKDPSGPPLDANIFQGKLYPEAKDHPEMKFLHWFRKWRQLHRDQEYEVTWYVSWSPCTRCANSVATFLAEDPKVTLTIFVARLYYFWKPDYQQALRILCQERGGPHATMKIMNYNEFQHCWNEFVDGQGKPFKPRKNLPKHYTLLHATLGELLRHVMDPGTFTSNFNNKPWVSGQRETYLCYKVERSHNDTWVLLNQHRGFLRNQAPDRHGFPKGRHAELCFLDLIPFWKLDDQQYRVTCFTSWSPCFSCAQKMAKFISNNKHVSLCIFAARIYDDQGRCQEGLRTLHRDGAKIAVMNYSEFEYCWDTFVDRQGRPFQPWDGLDEHSQALSGRLRAI

SEQ ID NO: 60 - protein, 384 aa, Homo sapiens
MKPHFRNTVERMYRDTFSYNFYNRPILSRRNTVWLCYEVKTKGPSRPPLDAKIFRGQVYSELKYHPEMRFFHWFSKWRKLHRDQEYEVTWYISWSPCTKCTRDMATFLAEDPKVTLTIFVARLYYFWDPDYQEALRSLCQKRDGPRATMKIMNYDEFQHCWSKFVYSQRELFEPWNNLPKYYILLHIMLGEILRHSMDPPTFTFNFNNEPWVRGRHETYLCYEVERMHNDTWVLLNQRRGFLCNQAPHKHGFLEGRHAELCFLDVIPFWKLDLDQDYRVTCFTSWSPCFSCAQEMAKFISKNKHVSLCIFTARIYDDQGRCQEGLRTLAEAGAKISIMTYSEFKHCWDTFVDHQGCPFQPWDGLDEHSQDLSGRLRAILQNQEN

SEQ ID NO: 61 - protein, 373 aa, Homo sapiens
MKPHFRNTVERMYRDTFSYNFYNRPILSRRNTVWLCYEVKTKGPSRPRLDAKIFRGQVYSQPEHHAEMCFLSWFCGNQLPAYKCFQITWFVSWTPCPDCVAKLAEFLAEHPNVTLTISAARLYYYWERDYRRALCRLSQAGARVKIMDDEEFAYCWENFVYSEGQPFMPWYKFDDNYAFLHRTLKEILRNPMEAMYPHIFYFHFKNLRKAYGRNESWLCFTMEVVKHHSPVSWKRGVFRNQVDPETHCHAERCFLSWFCDDILSPNTNYEVTWYTSWSPCPECAGEVAEFLARHSNVNLTIFTARLYYFWDTDYQEGLRSLSQEGASVEIMGYKDFKYCWENFVYNDDEPFKPWKGLKYNFLFLDSKLQEILE

SEQ ID NO: 62 - protein, 382 aa, Homo sapiens
MNPQIRNPMERMYRDTFYDNFENEPILYGRSYTWLCYEVKIKRGRSNLLWDTGVFRGQVYFKPQYHAEMCFLSWFCGNQLPAYKCFQITWFVSWTPCPDCVAKLAEFLSEHPNVTLTISAARLYYYWERDYRRALCRLSQAGARVTIMDYEEFAYCWENFVYNEGQQFMPWYKFDENYAFLHRTLKEILRYLMDPDTFTFNFNNDPLVLRRRQTYLCYEVERLDNGTWVLMDQHMGFLCNEAKNLLCGFYGRHAELRFLDLVPSLQLDPAQIYRVTWFISWSPCFSWGCAGEVRAFLQENTHVRLRIFAARIYDYDPLYKEALQMLRDAGAQVSIMTYDEFEYCWDTFVYRQGCPFQPWDGLEEHSQALSGRLRAILQNQGN

SEQ ID NO: 63 - protein, 396 aa, Rattus norvegicus
MQPQGLGPNAGMGPVCLGCSHRRPYSPIRNPLKKLYQQTFYFHFKNVRYAWGRKNNFLCYEVNGMDCALPVPLRQGVFRKQGHIHAELCFIYWFHDKVLRVLSPMEEFKVTWYMSWSPCSKCAEQVARFLAAHRNLSLAIFSSRLYYYLRNPNYQQKLCRLIQEGVHVAAMDLPEFKKCWNKFVDNDGQPFRPWMRLRINFSFYDCKLQEIFSRMNLLREDVFYLQFNNSHRVKPVQNRYYRRKSYLCYQLERANGQEPLKGYLLYKKGEQHVEILFLEKMRSMELSQVRITCYLTWSPCPNCARQLAAFKKDHPDLILRIYTSRLYFYWRKKFQKGLCTLWRSGIHVDVMDLPQFADCWTNFVNPQRPFRPWNELEKNSWRIQRRLRRIKESWGL

SEQ ID NO: 64 - protein, 227 aa, Bos taurus
DGWEVAFRSGTVLKAGVLGVSMTEGWAGSGHPGQGACVWTPGTRNTMNLLREVLFKQQFGNQPRVPAPYYRRKTYLCYQLKQRNDLTLDRGCFRNKKQRHAEIRFIDKINSLDLNPSQSYKIICYITWSPCPNCANELVNFITRNNHLKLEIFASRLYFHWIKSFKMGLQDLQNAGISVAVMTHTEFEDCWEQFVDNQSRPFQPWDKLEQYSASIRRRLQRILTAPI

SEQ ID NO: 65 - protein, 490 aa, Pan troglodytes
MNPQIRNPMEWMYQRTFYYNFENEPILYGRSYTWLCYEVKIRRGHSNLLWDTGVFRGQMYSQPEHHAEMCFLSWFCGNQLSAYKCFQITWFVSWTPCPDCVAKLAKFLAEHPNVTLTISAARLYYYWERDYRRALCRLSQAGARVKIMDDEEFAYCWENFVYNEGQPFMPWYKFDDNYAFLHRTLKEIIRHLMDPDTFTFNFNNDPLVLRRHQTYLCYEVERLDNGTWVLMDQHMGFLCNEAKNLLCGFYGRHAELRFLDLVPSLQLDPAQIYRVTWFISWSPCFSWGCAGQVRAFLQENTHVRLRIFAARIYDYDPLYKEALQMLRDAGAQVSIMTYDEFEYCWDTFVYRQGCPFQPWDGLEEHSQALSGRLRAILQVRASSLCMVPHRPPPPPQSPGPCLPLCSEPPLGSLLPTGRPAPSLPFLLTASFSFPPPASLPPLPSLSLSPGHLPVPSFHSLTSCSIQPPCSSRIRETEGWASVSKEGRDLG

SEQ ID NO: 66 - protein, 190 aa, Homo sapiens
MNPQIRNPMKAMYPGTFYFQFKNLWEANDRNETWLCFTVEGIKRRSVVSWKTGVFRNQVDSETHCHAERCFLSWFCDDILSPNTKYQVTWYTSWSPCPDCAGEVAEFLARHSNVNLTIFTARLYYFQYPCYQEGLRSLSQEGVAVEIMDYEDFKYCWENFVYNDNEPFKPWKGLKTNFRLLKRRLRESLQ

SEQ ID NO: 67 - protein, 190 aa, Gorilla gorilla
MNPQIRNPMKAMYPGTFYFQFKNLWEANDRNETWLCFTVEGIKRRSVVSWKTGVFRNQVDSETHCHAERCFLSWFCDDILSPNTNYQVTWYTSWSPCPECAGEVAEFLARHSNVNLTIFTARLYYFQDTDYQEGLRSLSQEGVAVKIMDYKDFKYCWENFVYNDDEPFKPWKGLKYNFRFLKRRLQEILE

SEQ ID NO: 68 - protein, 199 aa, Homo sapiens
MEASPASGPRHLMDPHIFTSNFNNGIGRHKTYLCYEVERLDNGTSVKMDQHRGFLHNQAKNLLCGFYGRHAELRFLDLVPSLQLDPAQIYRVTWFISWSPCFSWGCAGEVRAFLQENTHVRLRIFAARIYDYDPLYKEALQMLRDAGAQVSIMTYDEFKHCWDTFVDHQGCPFQPWDGLDEHSQALSGRLRAILQNQGN

SEQ ID NO: 69 - protein, 202 aa, Macaca mulatta
MDGSPASRPRHLMDPNTFTFNFNNDLSVRGRHQTYLCYEVERLDNGTWVPMDERRGFLCNKAKNVPCGDYGCHVELRFLCEVPSWQLDPAQTYRVTWFISWSPCFRRGCAGQVRVFLQENKHVRLRIFAARIYDYDPLYQEALRTLRDAGAQVSIMTYEEFKHCWDTFVDRQGRPFQPWDGLDEHSQALSGRLRAILQNQGN

SEQ ID NO: 70 - protein, 185 aa, Bos taurus
MDEYTFTENFNNQGWPSKTYLCYEMERLDGDATIPLDEYKGFVRNKGLDQPEKPCHAELYFLGKIHSWNLDRNQHYRLTCFISWSPCYDCAQKLTTFLKENHHISLHILASRIYTHNRFGCHQSGLCELQAAGARITIMTFEDFKHCWETFVDHKGKPFQPWEGLNVKSQALCTELQAILKTQQN

SEQ ID NO: 71 - protein, 200 aa, Homo sapiens
MALLTAETFRLQFNNKRRLRRPYYPRKALLCYQLTPQNGSTPTRGYFENKKKCHAEICFINEIKSMGLDETQCYQVTCYLTWSPCSSCAWELVDFIKAHDHLNLGIFASRLYYHWCKPQQKGLRLLCGSQVPVEVMGFPKFADCWENFVDHEKPLSFNPYKMLEELDKNSRAIKRRLERIKIPGVRAQGRYMDILCDAEV

SEQ ID NO: 72 - protein, 210 aa, Macaca mulatta
MALLTAKTFSLQFNNKRRVNKPYYPRKALLCYQLTPQNGSTPTRGHLKNKKKDHAEIRFINKIKSMGLDETQCYQVTCYLTWSPCPSCAGELVDFIKAHRHLNLRIFASRLYYHWRPNYQEGLLLLCGSQVPVEVMGLPEFTDCWENFVDHKEPPSFNPSEKLEELDKNSQAIKRRLERIKSRSVDVLENGLRSLQLGPVTPSSSIRNSR

SEQ ID NO: 73 - protein, 386 aa, Homo sapiens
MNPQIRNPMERMYRDTFYDNFENEPILYGRSYTWLCYEVKIKRGRSNLLWDTGVFRGPVLPKRQSNHRQEVYFRFENHAEMCFLSWFCGNRLPANRRFQITWFVSWNPCLPCVVKVTKFLAEHPNVTLTISAARLYYYRDRDWRWVLLRLHKAGARVKIMDYEDFAYCWENFVCNEGQPFMPWYKFDDNYASLHRTLKEILRNPMEAMYPHIFYFHFKNLLKACGRNESWLCFTMEVTKHHSAVFRKRGVFRNQVDPETHCHAERCFLSWFCDDILSPNTNYEVTWYTSWSPCPECAGEVAEFLARHSNVNLTIFTARLCYFWDTDYQEGLCSLSQEGASVKIMGYKDFVSCWKNFVYSDDEPFKPWKGLQTNFRLLKRRLREILQ

SEQ ID NO: 74 - protein, 236 aa, Homo sapiens
MTSEKGPSTGDPTLRRRIEPWEFDVFYDPRELRKEACLLYEIKWGMSRKIWRSSGKNTTNHVEVNFIKKFTSERDFHPSMSCSITWFLSWSPCWECSQAIREFLSRHPGVTLVIYVARLFWHMDQQNRQGLRDLVNSGVTIQIMRASEYYHCWRNFVNYPPGDEAHWPQYPPLWMMLYALELHCIILSLPPCLKISRRWQNHLTFFRLHLQNCHYQTIPPHILLATGLIHPSVAWR

SEQ ID NO: 75 - protein, 229 aa, Mus musculus
MSSETGPVAVDPTLRRRIEPHEFEVFFDPRELRKETCLLYEINWGGRHSVWRHTSQNTSNHVEVNFLEKFTTERYFRPNTRCSITWFLSWSPCGECSRAITEFLSRHPYVTLFIYIARLYHHTDQRNRQGLRDLISSGVTIQIMTEQEYCYCWRNFVNYPPSNEAYWPRYPHLWVKLYVLELYCIILGLPPCLKILRRKQPQLTFFTITLQTCHYQRIPPHLLWATGLK

SEQ ID NO: 76 - protein, 229 aa, Rattus norvegicus [sequence omitted]

SEQ ID NO: 77 - protein, 60 aa, Homo sapiens
MAQKEEAAVATEAASQNGEDLENLDDPEKLKELIELPPFEIVTGERLPANFFKFQFRNVE

SEQ ID NO: 78 - protein, 164 aa, Mus musculus
YSSGRNKTFLCYVVEAQGKGGQVQASRGYLEDEHAAAHAEEAFFNTILPAFDPALRYNVTWYVSSSPCAACADRIIKTLSKTKNLRLLILVGRLFMWEEPEIQAALKKLKEAGCKLRIMKPQDFEYVWQNFVEQEEGESKAFQPWEDIQENFLYYEEKLADILK

SEQ ID NO: 79 - protein, 224 aa, Rattus norvegicus
MAQKEEAAEAAAPASQNGDDLENLEDPEKLKELIDLPPFEIVTGVRLPVNFFKFQFRNVEYSSGRNKTFLCYVVEAQSKGGQVQATQGYLEDEHAGAHAEEAFFNTILPAFDPALKYNVTWYVSSSPCAACADRILKTLSKTKNLRLLILVSRLFMWEEPEVQAALKKLKEAGCKLRIMKPQDFEYLWQNFVEQEEGESKAFEPWEDIQENFLYYEEKLADILK

SEQ ID NO: 80 - protein, 60 aa, Bos taurus
MAQKEEAAAAAEPASQNGEEVENLEDPEKLKELIELPPFEIVTGERLPAHYFKFQFRNVE

SEQ ID NO: 81 - protein, 164 aa, Petromyzon marinus
YSSGRNKTFLCYVVEAQSKGGQVQASRGYLEDEHATNHAEEAFFNSIMPTFDPALRYMVTWYVSSSPCAACADRIVKTLNKTKNLRLLILVGRLFMWEEPEIQAALRKLKEAGCRLRIMKPQDFEYIWQNFVEQEEGESKAFEPWEDIQENFLYYEEKLADILK

SEQ ID NO: 82 - protein, 384 aa, Homo sapiens
MKPHFRNTVERMYRDTFSYNFYNRPILSRRNTVWLCYEVKTKGPSRPPLDAKIFRGQVYSELKYHPEMRFFHWFSKWRKLHRDQEYEVTWYISWSPCTKCTRDMATFLAEDPKVTLTIFVARLYYFWDPDYQEALRSLCQKRDGPRATMKIMNYDEFQHCWSKFVYSQRELFEPWNNLPKYYILLHIMLGEILRHSMDPPTFTFNFNNEPWVRGRHETYLCYEVERMHNDTWVLLNQRRGFLCNQAPHKHGFLEGRHAELCFLDVIPFWKLDLDQDYRVTCFTSWSPCFSCAQEMAKFISKNKHVSLCIFTARIYRRQGRCQEGLRTLAEAGAKISIMTYSEFKHCWDTFVDHQGCPFQPWDGLDEHSQDLSGRLRAILQNQEN

SEQ ID NO: 83 - protein, 184 aa, Homo sapiens
MDPPTFTFNFNNEPWVRGRHETYLCYEVERMHNDTWVLLNQRRGFLCNQAPHKHGFLEGRHAELCFLDVIPFWKLDLDQDYRVTCFTSWSPCFSCAQEMAKFISKNKHVSLCIFTARIYDDQGRCQEGLRTLAEAGAKISIMTYSEFKHCWDTFVDHQGCPFQPWDGLDEHSQDLSGRLRAILQ

SEQ ID NO: 84 - protein, 184 aa, Homo sapiens
MDPPTFTFNFNNEPWVRGRHETYLCYEVERMHNDTWVLLNQRRGFLCNQAPHKHGFLEGRHAELCFLDVIPFWKLDLDQDYRVTCFTSWSPCFSCAQEMAKFISKNKHVSLCIFTARIYRRQGRCQEGLRTLAEAGAKISIMTYSEFKHCWDTFVDHQGCPFQPWDGLDEHSQDLSGRLRAILQ

SEQ ID NO: 85 - DNA, 80 bp, Artificial Sequence
  Synthetic Polynucleotide
gtaggtagttaggatgaatggaaggttggtatagtcccgcggatttatttatttaatggatgacctctggatccatggac

SEQ ID NO: 86 - DNA, 80 bp, Artificial Sequence
  Synthetic Polynucleotide
gtaggtagttaggatgaatggaaggttggtatagcttccgcggatttatttatttatggatgacctctggatccatggac

SEQ ID NO: 87 - DNA, 80 bp, Artificial Sequence
  Synthetic Polynucleotide
gtaggtagttaggatgaatggaaggttggtatagccttccgcggatttatttattatggatgacctctggatccatggac

SEQ ID NO: 88 - DNA, 80 bp, Artificial Sequence
  Synthetic Polynucleotide
gtaggtagttaggatgaatggaaggttggtatagccattccgcggatttatttatttggatgacctctggatccatggac

SEQ ID NO: 89 - DNA, 80 bp, Artificial Sequence
  Synthetic Polynucleotide
gtaggtagttaggatgaatggaaggttggtatagcctattccgcggatttatttattggatgacctctggatccatggac

SEQ ID NO: 90 - DNA, 80 bp, Artificial Sequence
  Synthetic Polynucleotide
gtaggtagttaggatgaatggaaggttggtatagccttattccgcggatttatttatggatgacctctggatccatggac

SEQ ID NO: 91 - DNA, 80 bp, Artificial Sequence
  Synthetic Polynucleotide
gtaggtagttaggatgaatggaaggttggtatagccattattccgcggatttattttggatgacctctggatccatggac

SEQ ID NO: 92 - DNA, 80 bp, Artificial Sequence
  Synthetic Polynucleotide
gtaggtagttaggatgaatggaaggttggtatagcctattattccgcggatttatttggatgacctctggatccatggac

SEQ ID NO: 93 - DNA, 80 bp, Artificial Sequence
  Synthetic Polynucleotide
gtaggtagttaggatgaatggaaggttggtatagccattatattccgcggatttattggatgacctctggatccatggac

SEQ ID NO: 94 - DNA, 80 bp, Artificial Sequence
  Synthetic Polynucleotide
gtaggtagttaggatgaatggaaggttggtatagcctattatattccgcggatttatggatgacctctggatccatggac

SEQ ID NO: 95 - DNA, 80 bp, Artificial Sequence
  Synthetic Polynucleotide
gtaggtagttaggatgaatggaaggttggtatagccttattatattccgcggattttggatgacctctggatccatggac

SEQ ID NO: 96 - DNA, 80 bp, Artificial Sequence
  Synthetic Polynucleotide
gtaggtagttaggatgaatggaaggttggtatagccattattatattccgcggatttggatgacctctggatccatggac

SEQ ID NO: 97 - DNA, 80 bp, Artificial Sequence
  Synthetic Polynucleotide
gtaggtagttaggatgaatggaaggttggtatagcctattattatattccgcggattggatgacctctggatccatggac

SEQ ID NO: 98 - DNA, 80 bp, Artificial Sequence
  Synthetic Polynucleotide
gtaggtagttaggatgaatggaaggttggtatagccattattattattaccgcggatggatgacctctggatccatggac

SEQ ID NO: 99 - DNA, 80 bp, Artificial Sequence
  Synthetic Polynucleotide
gtaggtagttaggatgaatggaaggttggtatagccattattattattattaccgctggatgacctctggatccatggac

SEQ ID NO: 100 - DNA, 80 bp, Artificial Sequence
  Synthetic Polynucleotide
gtaggtagttaggatgaatggaaggttggtatagtaatattaatttatttatttaatggatgacctctggatccatggac

SEQ ID NO: 101 - DNA, 80 bp, Artificial Sequence
  Synthetic Polynucleotide
gtaggtagttaggatgaatggaaggttggtgtagattattatctgcggatttattggatgacctctggatccatggacat

SEQ ID NO: 102 - DNA, 80 bp, Artificial Sequence; identical to SEQ ID NO: 91
  Synthetic Polynucleotide

SEQ ID NO: 103 - RNA, 33 nt, Artificial Sequence
  Synthetic Polynucleotide
auuauuccgcggauuuauuuguuuuagagcuag

SEQ ID NO: 104 - RNA, 33 nt, Artificial Sequence
  Synthetic Polynucleotide
cguaggccaggguggucacgguuuuagagcuag

SEQ ID NO: 105 - DNA, 80 bp, Artificial Sequence
  Synthetic Polynucleotide
gtaggtagttaggatgaatggaaggttggtaactatgctgccgcccagtgggactttggaaatacaatgtgtcaactctt

SEQ ID NO: 106 - DNA, 80 bp, Artificial Sequence
  Synthetic Polynucleotide
gtaggtagttaggatgaatggaaggttggtaaaatacaatgtgtcaactcttgacagggctctattttataggcttcttc

SEQ ID NO: 107 - DNA, 80 bp, Artificial Sequence
  Synthetic Polynucleotide
gtaggtagttaggatgaatggaaggttggtattttccatacagtcagtatcaattctggaagaatttccagacattaaag

SEQ ID NO: 108 - DNA, 80 bp, Artificial Sequence
  Synthetic Polynucleotide
gtaggtagttaggatgaatggaaggttggtagcttcggtgtcgaaatgagaagaagaggcacagggctgtgaggcttatc

SEQ ID NO: 109 - DNA, 80 bp, Artificial Sequence
  Synthetic Polynucleotide
gtaggtagttaggatgaatggaaggttggtagtgagcccagaaggggacagtaagaaggaaaaacaggtcagagatggcc

SEQ ID NO: 110 - DNA, 80 bp, Artificial Sequence
  Synthetic Polynucleotide
gtaggtagttaggatgaatggaaggttggtatcctgaacaccttccaggaattctttggcctgaataattgcagtagctc

SEQ ID NO: 111 - DNA, 80 bp, Artificial Sequence
  Synthetic Polynucleotide
gtaggtagttaggatgaatggaaggttggtagacatggaggacgtgcgcggccgcctggtgcagtaccgcggcgaggtgc

SEQ ID NO: 112 - DNA, 80 bp, Artificial Sequence
  Synthetic Polynucleotide
gtaggtagttaggatgaatggaaggttggtactgcagaagcgcctggcagtgtaccaggccggggcccgcgagggcgccg

SEQ ID NO: 113 - DNA, 80 bp, Artificial Sequence
  Synthetic Polynucleotide
gtaggtagttaggatgaatggaaggttggtagccgacaagcagaagaacggcatcaaggtgaacttcaagatccgccaca

SEQ ID NO: 114 - DNA, 80 bp, Artificial Sequence
  Synthetic Polynucleotide
gtaggtagttaggatgaatggaaggttggtaaccactaccagcagaacacccccatcggcgacggccccgtgctgctgcc

SEQ ID NO: 115 - DNA, 81 bp, Artificial Sequence
  Synthetic Polynucleotide
gtaggtagttaggatgaatggaaggttggtacctcgcccttgctcaccatctcgagtcggccgccagtgtgatggatatct

SEQ ID NO: 116 - DNA, 79 bp, Artificial Sequence
  Synthetic Polynucleotide
gtaggtagttaggatgaatggaaggttggtacacgcgtaggccagggtggtcacgagggtgggccagggcacgggcagc

SEQ ID NO: 117 - DNA, 80 bp, Artificial Sequence
  Synthetic Polynucleotide
gtaggtagttaggatgaatggaaggttggtaaagcactgcactccgcaggtcagggtggtcacgagggttggccagggca

SEQ ID NO: 118 - DNA, 80 bp, Artificial Sequence
  Synthetic Polynucleotide
gtaggtagttaggatgaatggaaggttggtacactccgcaggtcagggtggtcacgagggttggccagggcacgggcagg

SEQ ID NO: 119 - DNA, 80 bp, Artificial Sequence
  Synthetic Polynucleotide
gtaggtagttaggatgaatggaaggttggtaggatctcttcttcacggttgcctactggttcaattacttttaaaaatgg

SEQ ID NO: 120 - DNA, 80 bp, Artificial Sequence
  Synthetic Polynucleotide
gtaggtagttaggatgaatggaaggttggtattctcgattgaggatctcttcttcacggttgcctactggttcaattact

SEQ ID NO: 121 - DNA, 80 bp, Artificial Sequence
  Synthetic Polynucleotide
gtaggtagttaggatgaatggaaggttggtaaggagctgtggcagtggcaccagaatggattccagagtccaggtaagac

SEQ ID NO: 122 - DNA, 80 bp, Artificial Sequence
  Synthetic Polynucleotide
gtaggtagttaggatgaatggaaggttggtagtactcctcccggccggcggtatccaggatgtccaacaggcacgtctcc

SEQ ID NO: 123 - DNA, 80 bp, Artificial Sequence
  Synthetic Polynucleotide
gtaggtagttaggatgaatggaaggttggtatgactgcttgcagatggccatggcgcggacgcgggtgccgggcgggggt

SEQ ID NO: 124 - DNA, 80 bp, Artificial Sequence
  Synthetic Polynucleotide
gtaggtagttaggatgaatggaaggttggtactgttacacatgcagttgtagtggatggtggtacagtcagagccaacct

SEQ ID NO: 125 - DNA, 80 bp, Artificial Sequence
  Synthetic Polynucleotide
gtaggtagttaggatgaatggaaggttggtaggaactgtcacacatgtagttgtagtggatggtggtacagtcagagcca

SEQ ID NO: 126 - protein, 1623 aa, Artificial Sequence
  Synthetic Polypeptide
MSSETGPVAVDPTLRRRIEPHEFEVFFDPRELRKETCLLYEINWGGRHSIWRHTSQNTNKHVEVNFIEKFTTERYFCPNTRCSITWFLSWSPCGECSRAITEFLSRYPHVTLFIYIARLYHHADPRNRQGLRDLISSGVTIQIMTEQESGYCWRNFVNYSPSNEAHWPRYPHLWVRLYVLELYCIILGLPPCLNILRRKQPQLTFFTIALQSCHYQRLPPHILWATGLKSGSETPGTSESATPESDKKYSIGLAIGTNSVGWAVITDEYKVPSKKFKVLGNTDRHSIKKNLIGALLFDSGETAEATRLKRTARRRYTRRKNRICYLQEIFSNEMAKVDDSFFHRLEESFLVEEDKKHERHPIFGNIVDEVAYHEKYPTIYHLRKKLVDSTDKADLRLIYLALAHMIKFRGHFLIEGDLNPDNSDVDKLFIQLVQTYNQLFEENPINASGVDAKAILSARLSKSRRLENLIAQLPGEKKNGLFGNLIALSLGLTPNFKSNFDLAEDAKLQLSKDTYDDDLDNLLAQIGDQYADLFLAAKNLSDAILLSDILRVNTEITKAPLSASMIKRYDEHHQDLTLLKALVRQQLPEKYKEIFFDQSKNGYAGYIDGGASQEEFYKFIKPILEKMDGTEELLVKLNREDLLRKQRTFDNGSIPHQIHLGELHAILRRQEDFYPFLKDNREKIEKILTFRIPYYVGPLARGNSRFAWMTRKSEETITPWNFEEVVDKGASAQSFIERMTNFDKNLPNEKVLPKHSLLYEYFTVYNELTKVKYVTEGMRKPAFLSGEQKKAIVDLLFKTNRKVTVKQLKEDYFKKIECFDSVEISGVEDRFNASLGTYHDLLKIIKDKDFLDNEENEDILEDIVLTLTLFEDREMIEERLKTYAHLFDDKVMKQLKRRRYTGWGRLSRKLINGIRDKQSGKTILDFLKSDGFANRNFMQLIHDDSLTFKEDIQKAQVSGQGDSLHEHIANLAGSPAIKKGILQTVKVVDELVKVMGRHKPENIVIEMARENQTTQKGQKNSRERMKRIEEGIKELGSQILKEHPVENTQLQNEKLYLYYLQNGRDMYVDQELDINRLSDYDVDAIVPQSFLKDDSIDNKVLTRSDKNRGKSDNVPSEEVVKKMKNYWRQLLNAKLITQRKFDNLTKAERGGLSELDKAGFIKRQLVETRQITKHVAQILDSRMNTKYDENDKLIREVKVITLKSKLVSDFRKDFQFYKVREINNYHHAHDAYLNAVVGTALIKKYPKLESEFVYGDYKVYDVRKMIAKSEQEIGKATAKYFFYSNIMNFFKTEITLANGEIRKRPLIETNGETGEIVWDKGRDFATVRKVLSMPQVNIVKKTEVQTGGFSKESILPKRNSDKLIARKKDWDPKKYGGFDSPTVAYSVLVVAKVEKGKSKKLKSVKELLGITIMERSSFEKNPIDFLEAKGYKEVKKDLIIKLPKYSLFELENGRKRMLASAGELQKGNELALPSKYVNFLYLASHYEKLKGSPEDNEQKQLFVEQHKHYLDEIIEQISEFSKRVILADANLDKVLSAYNKHRDKPIREQAENIIHLFTLTNLGAPAAFKYFDTTIDRKRYTSTKEVLDATLIHQSITGLYETRIDLSQLGGDSGGSPKKKRKV

SEQ ID NO: 127 - DNA, 23 bp, Artificial Sequence
  Synthetic Polynucleotide
gagtccgagcagaagaagaaggg

SEQ ID NO: 128 - DNA, 23 bp, Artificial Sequence
  Synthetic Polynucleotide
ggaatcccttctgcagcacctgg

SEQ ID NO: 129 - DNA, 23 bp, Artificial Sequence
  Synthetic Polynucleotide
gaacacaaagcatagactgcggg

SEQ ID NO: 130 - DNA, 23 bp, Artificial Sequence
  Synthetic Polynucleotide
ggcccagactgagcacgtgatgg

SEQ ID NO: 131 - DNA, 23 bp, Artificial Sequence
  Synthetic Polynucleotide
ggcactgcggctggaggtccggg

SEQ ID NO: 132 - DNA, 23 bp, Artificial Sequence
  Synthetic Polynucleotide
gtcatcttagtcattacctgagg

SEQ ID NO: 133 - protein, 1710 aa, Artificial Sequence
  Synthetic Polypeptide
MSSETGPVAVDPTLRRRIEPHEFEVFFDPRELRKETCLLYEINWGGRHSIWRHTSQNTNKHVEVNFIEKFTTERYFCPNTRCSITWFLSWSPCGECSRAITEFLSRYPHVTLFIYIARLYHHADPRNRQGLRDLISSGVTIQIMTEQESGYCWRNFVNYSPSNEAHWPRYPHLWVRLYVLELYCIILGLPPCLNILRRKQPQLTFFTIALQSCHYQRLPPHILWATGLKSGSETPGTSESATPESDKKYSIGLAIGTNSVGWAVITDEYKVPSKKFKVLGNTDRHSIKKNLIGALLFDSGETAEATRLKRTARRRYTRRKNRICYLQEIFSNEMAKVDDSFFHRLEESFLVEEDKKHERHPIFGNIVDEVAYHEKYPTIYHLRKKLVDSTDKADLRLIYLALAHMIKFRGHFLIEGDLNPDNSDVDKLFIQLVQTYNQLFEENPINASGVDAKAILSARLSKSRRLENLIAQLPGEKKNGLFGNLIALSLGLTPNFKSNFDLAEDAKLQLSKDTYDDDLDNLLAQIGDQYADLFLAAKNLSDAILLSDILRVNTEITKAPLSASMIKRYDEHHQDLTLLKALVRQQLPEKYKEIFFDQSKNGYAGYIDGGASQEEFYKFIKPILEKMDGTEELLVKLNREDLLRKQRTFDNGSIPHQIHLGELHAILRRQEDFYPFLKDNREKIEKILTFRIPYYVGPLARGNSRFAWMTRKSEETITPWNFEEVVDKGASAQSFIERMTNFDKNLPNEKVLPKHSLLYEYFTVYNELTKVKYVTEGMRKPAFLSGEQKKAIVDLLFKTNRKVTVKQLKEDYFKKIECFDSVEISGVEDRFNASLGTYHDLLKIIKDKDFLDNEENEDILEDIVLTLTLFEDREMIEERLKTYAHLFDDKVMKQLKRRRYTGWGRLSRKLINGIRDKQSGKTILDFLKSDGFANRNFMQLIHDDSLTFKEDIQKAQVSGQGDSLHEHIANLAGSPAIKKGILQTVKVVDELVKVMGRHKPENIVIEMARENQTTQKGQKNSRERMKRIEEGIKELGSQILKEHPVENTQLQNEKLYLYYLQNGRDMYVDQELDINRLSDYDVDAIVPQSFLKDDSIDNKVLTRSDKNRGKSDNVPSEEVVKKMKNYWRQLLNAKLITQRKFDNLTKAERGGLSELDKAGFIKRQLVETRQITKHVAQILDSRMNTKYDENDKLIREVKVITLKSKLVSDFRKDFQFYKVREINNYHHAHDAYLNAVVGTALIKKYPKLESEFVYGDYKVYDVRKMIAKSEQEIGKATAKYFFYSNIMNFFKTEITLANGEIRKRPLIETNGETGEIVWDKGRDFATVRKVLSMPQVNIVKKTEVQTGGFSKESILPKRNSDKLIARKKDWDPKKYGGFDSPTVAYSVLVVAKVEKGKSKKLKSVKELLGITIMERSSFEKNPIDFLEAKGYKEVKKDLIIKLPKYSLFELENGRKRMLASAGELQKGNELALPSKYVNFLYLASHYEKLKGSPEDNEQKQLFVEQHKHYLDEIIEQISEFSKRVILADANLDKVLSAYNKHRDKPIREQAENIIHLFTLTNLGAPAAFKYFDTTIDRKRYTSTKEVLDATLIHQSITGLYETRIDLSQLGGDSGGSTNLSDIIEKETGKQLVIQESILMLPEEVEEVIGNKPESDILVHTAYDESTDENVMLLTSDAPEYKPWALVIQDSNGENKIKMLSGGSPKKKRKV

SEQ ID NO: 134 - protein, 84 aa, Bacillus phage PBS2
MTNLSDIIEKETGKQLVIQESILMLPEEVEEVIGNKPESDILVHTAYDESTDENVMLLTSDAPEYKPWALVIQDSNGENKIKML

SEQ ID NO: 135 - protein, 181 aa, Erwinia tasmaniensis
MASRGVNKVILVGNLGQDPEVRYMPNGGAVANITLATSESWRDKQTGETKEKTEWHRVVLFGKLAEVAGEYLRKGSQVYIEGALQTRKWTDQAGVEKYTTEVVVNVGGTMQMLGGRSQGGGASAGGQNGGSNNGWGQPQQPQGGNQFSGGAQQQARPQQQPQQNNAPANNEPPIDFDDDIP

SEQ ID NO: 136 - protein, 209 aa, Artificial Sequence
  Synthetic Polypeptide
MAGAQDFVPHTADLAELAAAAGECRGCGLYRDATQAVFGAGGRSARIMMIGEQPGDKEDLAGLPFVGPAGRLLDRALEAADIDRDALYVTNAVKHFKFTRAAGGKRRIHKTPSRTEVVACRPWLIAEMTSVEPDVVVLLGATAAKALLGNDFRVTQHRGEVLHVDDVPGDPALVATVHPSSLLRGPKEERESAFAGLVDDLRVAADVRP

SEQ ID NO: 137 - protein, 313 aa, Artificial Sequence
  Synthetic Polypeptide
MIGQKTLYSFFSPSPARKRHAPSPEPAVQGTGVAGVPEESGDAAAIPAKKAPAGQEEPGTPPSSPLSAEQLDRIQRNKAAALLRLAARNVPVGFGESWKKHLSGEFGKPYFIKLMGFVAEERKHYTVYPPPHQVFTWTQMCDIKDVKVVILGQEPYHGPNQAHGLCFSVQRPVPPPPSLENIYKELSTDIEDFVHPGHGDLSGWAKQGVLLLNAVLTVRAHQANSHKERGWEQFTDAVVSWLNQNSNGLVFLLWGSYAQKKGSAIDRKRHHVLQTAHPSPLSVYRGFFGCRHFSKTNELLQKSGKKPIDWKEL

SEQ ID NO: 138 - protein, 148 aa, Homo sapiens
MFRRPVLQVLRQFVRHESETTTSLVLERSLNRVHLLGRVGQDPVLRQVEGKNPVTIFSLATNEMWRSGDSEVYQLGDVSQKTTWHRISVFRPGLRDVAYQYVKKGSRIYLEGKIDYGEYMDKNNVRRQATTIIADNIIFLSDQTKEKE

SEQ ID NO: 139 - protein, 388 aa, Mus musculus
MFAKGKGSAVPSDGQAREKLALYVYEYLLHVGAQKSAQTFLSEIRWEKNITLGEPPGFLHSWWCVFWDLYCAAPERRDTCEHSSEAKAFHDYSAAAAPSPVLGNIPPNDGMPGGPIPPGFFQGPPGSQPSPHAQPPPHNPSSMMGPHSQPFMSPRYAGGPRPPIRMGNQPPGGVPGTQPLLPNSMDPTRQQGHPNMGGSMQRMNPPRGMGPMGPGPQNYGSGMRPPPNSLGPAMPGINMGPGAGRPWPNPNSANSIPYSSSSPGTYVGPPGGGGPPGTPIMPSPADSTNSSDNIYTMINPVPPGGSRSNFPMGPGSDGPMGGMGGMEPHHMNGSLGSGDIDGLPKNSPNNISGISNPPGTPRDDGELGGNFLHSFQNDNYSPSMTMSV

SEQ ID NO: 140 - protein, 616 aa, Homo sapiens
MVGQLSEGAIAAIMQKGDTNIKPILQVINIRPITTGNSPPRYRLLMSDGLNTLSSFMLATQLNPLVEEEQLSSNCVCQIHRFIVNTLKDGRRVVILMELEVLKSAEAVGVKIGNPVPYNEGLGQPQVAPPAPAASPAASSRPQPQNGSSGMGSTVSKAYGASKTFGKAAGPSLSHTSGGTQSKVVPIASLTPYQSKWTICARVTNKSQIRTWSNSRGEGKLFSLELVDESGEIRATAFNEQVDKFFPLIEVNKVYYFSKGTLKIANKQFTAVKNDYEMTFNNETSVMPCEDDHHLPTVQFDFTGIDDLENKSKDSLVDIIGICKSYEDATKITVRSNNREVAKRNIYLMDTSGKVVTATLWGEDADKFDGSRQPVLAIKGARVSDFGGRSLSVLSSSTIIANPDIPEAYKLRGWFDAEGQALDGVSISDLKSGGVGGSNTNWKTLYEVKSENLGQGDKPDYFSSVATVVYLRKENCMYQACPTQDCNKKVIDQQNGLYRCEKCDTEFPNFKYRMILSVNIADFQENQWVTCFQESAEAILGQNAAYLGELKDKNEQAFEEVFQNANFRSFIFRVRVKVETYNDESRIKATVMDVKPVDYREYGRRLVMSIRRSALM

SEQ ID NO: 141 - protein, 270 aa, Homo sapiens
MWNSGFESYGSSSYGGAGGYTQSPGGFGSPAPSQAEKKSRARAQHIVPCTISQLLSATLVDEVFRIGNVEISQVTIVGIIRHAEKAPTNIVYKIDDMTAAPMDVRQWVDTDDTSSENTVVPPETYVKVAGHLRSFQNKKSLVAFKIMPLEDMNEFTTHILEVINAHMVLSKANSQPSAGRAPISNPGMSEAGNFGGNSFMPANGLTVAQNQVLNLIKACPRPEGLNFQDLKNQLKHMSVSSIKQAVDFLSNEGHIYSTVDDDHFKSTDAE

SEQ ID NO: 142 - protein, 121 aa, Homo sapiens
MVDMMDLPRSRINAGMLAQFIDKPVCFVGRLEKIHPTGKMFILSDGEGKNGTIELMEPLDEEISGIVEVVGRVTAKATILCTSYVQFKEDSHPFDLGLYNEAVKIIHDFPQFYPLGIVQHD

SEQ ID NO: 143 - protein, 171 aa, Bacillus subtilis
MLNRVVLVGRLTKDPELRYTPNGAAVATFTLAVNRTFTNQGEREADFINCVTWRRQAENVANFLKKGSLAGVDGRLQTRNYENQQGQRVFVTEVQAESVQFLEPKNGGGSGSGGYNEGNSGGGQYFGGGQNDNPFGGNQNNQRRNQGNSFNDDPFANDGKPIDISDDDLPF

SEQ ID NO: 144 - protein, 199 aa, Streptomyces coelicolor
MAGETVITVVGNLVDDPELRFTPSGAAVAKFRVASTPRTFDRQTNEWKDGESLFLTCSVWRQAAENVAESLQRGMRVIVQGRLKQRSYEDREGVKRTVYELDVDEVGASLRSATAKVTKTSGQGRGGQGGYGGGGGGQGGGGWGGGPGGGQQGGGAPADDPWATGGAPAGGQQGGGGQGGGGWGGGSGGGGGYSDEPPF

SEQ ID NO: 145 - protein, 156 aa, Streptococcus pneumoniae
MINNVVLVGRMTRDAELRYTPSNVAVATFTLAVNRTFKSQNGEREADFINVVMWRQQAENLANWAKKGSLIGVTGRIQTRSYDNQQGQRVYVTEVVAENFQMLESRSVREGHTGGAYSAPTANYSAPTNSVPDFSRNENPFGATNPLDISDDDLPF

SEQ ID NO: 146 - protein, 1196 aa, Human alphaherpesvirus
METKPKTATTIKVPPGPLGYVYARACPSEGIELLALLSARSGDSDVAVAPLVVGLTVESGFEANVAVVVGSRTTGLGGTAVSLKLTPSHYSSSVYVFHGGRHLDPSTQAPNLTRLCERARRHFGFSDYTPRPGDLKHETTGEALCERLGLDPDRALLYLVVTEGFKEAVCINNTFLHLGGSDKVTIGGAEVHRIPVYPLQLFMPDFSRVIAEPFNANHRSIGENFTYPLPFFNRPLNRLLFEAVVGPAAVALRCRNVDAVARAAAHLAFDENHEGAALPADITFTAFEASQGKTPRGGRDGGGKGPAGGFEQRLASVMAGDAALALESIVSMAVFDEPPTDISAWPLFEGQDTAAARANAVGAYLARAAGLVGAMVFSTNSALHLTEVDDAGPADPKDHSKPSFYRFFLVPGTHVAANPQVDREGHVVPGFEGRPTAPLVGGTQEFAGEHLAMLCGFSPALLAKMLFYLERCDGGVIVGRQEMDVFRYVADSNQTDVPCNLCTFDTRHACVHTTLMRLRARHPKFASAARGAIGVFGTMNSMYSDCDVLGNYAAFSALKRADGSETARTIMQETYRAATERVMAELETLQYVDQAVPTAMGRLETIITNREALHTVVNNVRQVVDREVEQLMRNLVEGRNFKFRDGLGEANHAMSLTLDPYACGPCPLLQLLGRRSNLAVYQDLALSQCHGVFAGQSVEGRNFRNQFQPVLRRRVMDMFNNGFLSAKTLTVALSEGAAICAPSLTAGQTAPAESSFEGDVARVTLGFPKELRVKSRVLFAGASANASEAAKARVASLQSAYQKPDKRVDILLGPLGFLLKQFHAAIFPNGKPPGSNQPNPQWFWTALQRNQLPARLLSREDIETIAFIKKFSLDYGAINFINLAPNNVSELAMYYMANQILRYCDHSTYFINTLTAIIAGSRRPPSVQAAAAWSAQGGAGLEAGARALMDAVDAHPGAWTSMFASCNLLRPVMAARPMVVLGLSISKYYGMAGNDRVFQAGNWASLMGGKNACPLLIFDRTRKFVLACPRAGFVCAASSLGGGAHESSLCEQLRGIISEGGAAVASSVFVATVKSLGPRTQQLQIEDWLALLEDEYLSEEMMELTARALERGNGEWSTDAALEVAHEAEALVSQLGNAGEVFNFGDFGCEDDNATPFGGPGAPGPAFAGRKRAFHGDDPFGEGPPDKKGDLTLDML

SEQ ID NO: 147 - protein, 124 aa, Bacillus virus phi29
MENTNIVKATFDTETLEGQIKIFNAQTGGGQSFKNLPDGTIIEANAIAQYKQVSDTYGDAKEETVTTIFAADGSLYSAISKTVAEAASDLIDLVTRHKLETFKVKVVQGTSSKGNVFFSLQLSL

SEQ ID NO: 148 - protein, 162 aa, Burkholderia virus
MASVNKVILVGNLGADPETRYLPSGDAISNIRLATTDRYKDKASGEMKESTEWHRVSFFGRLAEIVDEYLRKGAPVYIEGRIRTRKWQDNAGQDRYTTEIVAEKMQMLGDRRDGGERQQRAPQQQQQRTQRNGYADATGRAQPSQRPAAGGGFDEMDDDIPF

SEQ ID NO: 149 - protein, 1599 aa, Artificial Sequence
  Synthetic Polypeptide
MSSETGPVAVDPTLRRRIEPHEFEVFFDPRELRKETCLLYEINWGGRHSIWRHTSQNTNKHVEVNFIEKFTTERYFCPNTRCSITWFLSWSPCGECSRAITEFLSRYPHVTLFIYIARLYHHADPRNRQGLRDLISSGVTIQIMTEQESGYCWRNFVNYSPSNEAHWPRYPHLWVRLYVLELYCIILGLPPCLNILRRKQPQLTFFTIALQSCHYQRLPPHILWATGLKGGSDKKYSIGLAIGTNSVGWAVITDEYKVPSKKFKVLGNTDRHSIKKNLIGALLFDSGETAEATRLKRTARRRYTRRKNRICYLQEIFSNEMAKVDDSFFHRLEESFLVEEDKKHERHPIFGNIVDEVAYHEKYPTIYHLRKKLVDSTDKADLRLIYLALAHMIKFRGHFLIEGDLNPDNSDVDKLFIQLVQTYNQLFEENPINASGVDAKAILSARLSKSRRLENLIAQLPGEKKNGLFGNLIALSLGLTPNFKSNFDLAEDAKLQLSKDTYDDDLDNLLAQIGDQYADLFLAAKNLSDAILLSDILRVNTEITKAPLSASMIKRYDEHHQDLTLLKALVRQQLPEKYKEIFFDQSKNGYAGYIDGGASQEEFYKFIKPILEKMDGTEELLVKLNREDLLRKQRTFDNGSIPHQIHLGELHAILRRQEDFYPFLKDNREKIEKILTFRIPYYVGPLARGNSRFAWMTRKSEETITPWNFEEVVDKGASAQSFIERMTNFDKNLPNEKVLPKHSLLYEYFTVYNELTKVKYVTEGMRKPAFLSGEQKKAIVDLLFKTNRKVTVKQLKEDYFKKIECFDSVEISGVEDRFNASLGTYHDLLKIIKDKDFLDNEENEDILEDIVLTLTLFEDREMIEERLKTYAHLFDDKVMKQLKRRRYTGWGRLSRKLINGIRDKQSGKTILDFLKSDGFANRNFMQLIHDDSLTFKEDIQKAQVSGQGDSLHEHIANLAGSPAIKKGILQTVKVVDELVKVMGRHKPENIVIEMARENQTTQKGQKNSRERMKRIEEGIKELGSQILKEHPVENTQLQNEKLYLYYLQNGRDMYVDQELDINRLSDYDVDAIVPQSFLKDDSIDNKVLTRSDKNRGKSDNVPSEEVVKKMKNYWRQLLNAKLITQRKFDNLTKAERGGLSELDKAGFIKRQLVETRQITKHVAQILDSRMNTKYDENDKLIREVKVITLKSKLVSDFRKDFQFYKVREINNYHHAHDAYLNAVVGTALIKKYPKLESEFVYGDYKVYDVRKMIAKSEQEIGKATAKYFFYSNIMNFFKTEITLANGEIRKRPLIETNGETGEIVWDKGRDFATVRKVLSMPQVNIVKKTEVQTGGFSKESILPKRNSDKLIARKKDWDPKKYGGFDSPTVAYSVLVVAKVEKGKSKKLKSVKELLGITIMERSSFEKNPIDFLEAKGYKEVKKDLIIKLPKYSLFELENGRKRMLASAGELQKGNELALPSKYVNFLYLASHYEKLKGSPEDNEQKQLFVEQHKHYLDEIIEQISEFSKRVILADANLDKVLSAYNKHRDKPIREQAENIIHLFTLTNLGAPAAFKYFDTTIDRKRYTSTKEVLDATLIHQSITGLYETRIDLSQLGGD

SEQ ID NO: 150 - protein, 1606 aa, Artificial Sequence
  Synthetic Polypeptide
MSSETGPVAVDPTLRRRIEPHEFEVFFDPRELRKETCLLYEINWGGRHSIWRHTSQNTNKHVEVNFIEKFTTERYFCPNTRCSITWFLSWSPCGECSRAITEFLSRYPHVTLFIYIARLYHHADPRNRQGLRDLISSGVTIQIMTEQESGYCWRNFVNYSPSNEAHWPRYPHLWVRLYVLELYCIILGLPPCLNILRRKQPQLTFFTIALQSCHYQRLPPHILWATGLKGGSGGSGGSMDKKYSIGLAIGTNSVGWAVITDEYKVPSKKFKVLGNTDRHSIKKNLIGALLFDSGETAEATRLKRTARRRYTRRKNRICYLQEIFSNEMAKVDDSFFHRLEESFLVEEDKKHERHPIFGNIVDEVAYHEKYPTIYHLRKKLVDSTDKADLRLIYLALAHMIKFRGHFLIEGDLNPDNSDVDKLFIQLVQTYNQLFEENPINASGVDAKAILSARLSKSRRLENLIAQLPGEKKNGLFGNLIALSLGLTPNFKSNFDLAEDAKLQLSKDTYDDDLDNLLAQIGDQYADLFLAAKNLSDAILLSDILRVNTEITKAPLSASMIKRYDEHHQDLTLLKALVRQQLPEKYKEIFFDQSKNGYAGYIDGGASQEEFYKFIKPILEKMDGTEELLVKLNREDLLRKQRTFDNGSIPHQIHLGELHAILRRQEDFYPFLKDNREKIEKILTFRIPYYVGPLARGNSRFAWMTRKSEETITPWNFEEVVDKGASAQSFIERMTNFDKNLPNEKVLPKHSLLYEYFTVYNELTKVKYVTEGMRKPAFLSGEQKKAIVDLLFKTNRKVTVKQLKEDYFKKIECFDSVEISGVEDRFNASLGTYHDLLKIIKDKDFLDNEENEDILEDIVLTLTLFEDREMIEERLKTYAHLFDDKVMKQLKRRRYTGWGRLSRKLINGIRDKQSGKTILDFLKSDGFANRNFMQLIHDDSLTFKEDIQKAQVSGQGDSLHEHIANLAGSPAIKKGILQTVKVVDELVKVMGRHKPENIVIEMARENQTTQKGQKNSRERMKRIEEGIKELGSQILKEHPVENTQLQNEKLYLYYLQNGRDMYVDQELDINRLSDYDVDAIVPQSFLKDDSIDNKVLTRSDKNRGKSDNVPSEEVVKKMKNYWRQLLNAKLITQRKFDNLTKAERGGLSELDKAGFIKRQLVETRQITKHVAQILDSRMNTKYDENDKLIREVKVITLKSKLVSDFRKDFQFYKVREINNYHHAHDAYLNAVVGTALIKKYPKLESEFVYGDYKVYDVRKMIAKSEQEIGKATAKYFFYSNIMNFFKTEITLANGEIRKRPLIETNGETGEIVWDKGRDFATVRKVLSMPQVNIVKKTEVQTGGFSKESILPKRNSDKLIARKKDWDPKKYGGFDSPTVAYSVLVVAKVEKGKSKKLKSVKELLGITIMERSSFEKNPIDFLEAKGYKEVKKDLIIKLPKYSLFELENGRKRMLASAGELQKGNELALPSKYVNFLYLASHYEKLKGSPEDNEQKQLFVEQHKHYLDEIIEQISEFSKRVILADANLDKVLSAYNKHRDKPIREQAENIIHLFTLTNLGAPAAFKYFDTTIDRKRYTSTKEVLDATLIHQSITGLYETRIDLSQLGGD

SEQ ID NO: 151 - protein, 1599 aa, Artificial Sequence
  Synthetic Polypeptide
DKKYSIGLAIGTNSVGWAVITDEYKVPSKKFKVLGNTDRHSIKKNLIGALLFDSGETAEATRLKRTARRRYTRRKNRICYLQEIFSNEMAKVDDSFFHRLEESFLVEEDKKHERHPIFGNIVDEVAYHEKYPTIYHLRKKLVDSTDKADLRLIYLALAHMIKFRGHFLIEGDLNPDNSDVDKLFIQLVQTYNQLFEENPINASGVDAKAILSARLSKSRRLENLIAQLPGEKKNGLFGNLIALSLGLTPNFKSNFDLAEDAKLQLSKDTYDDDLDNLLAQIGDQYADLFLAAKNLSDAILLSDILRVNTEITKAPLSASMIKRYDEHHQDLTLLKALVRQQLPEKYKEIFFDQSKNGYAGYIDGGASQEEFYKFIKPILEKMDGTEELLVKLNREDLLRKQRTFDNGSIPHQIHLGELHAILRRQEDFYPFLKDNREKIEKILTFRIPYYVGPLARGNSRFAWMTRKSEETITPWNFEEVVDKGASAQSFIERMTNFDKNLPNEKVLPKHSLLYEYFTVYNELTKVKYVTEGMRKPAFLSGEQKKAIVDLLFKTNRKVTVKQLKEDYFKKIECFDSVEISGVEDRFNASLGTYHDLLKIIKDKDFLDNEENEDILEDIVLTLTLFEDREMIEERLKTYAHLFDDKVMKQLKRRRYTGWGRLSRKLINGIRDKQSGKTILDFLKSDGFANRNFMQLIHDDSLTFKEDIQKAQVSGQGDSLHEHIANLAGSPAIKKGILQTVKVVDELVKVMGRHKPENIVIEMARENQTTQKGQKNSRERMKRIEEGIKELGSQILKEHPVENTQLQNEKLYLYYLQNGRDMYVDQELDINRLSDYDVDAIVPQSFLKDDSIDNKVLTRSDKNRGKSDNVPSEEVVKKMKNYWRQLLNAKLITQRKFDNLTKAERGGLSELDKAGFIKRQLVETRQITKHVAQILDSRMNTKYDENDKLIREVKVITLKSKLVSDFRKDFQFYKVREINNYHHAHDAYLNAVVGTALIKKYPKLESEFVYGDYKVYDVRKMIAKSEQEIGKATAKYFFYSNIMNFFKTEITLANGEIRKRPLIETNGETGEIVWDKGRDFATVRKVLSMPQVNIVKKTEVQTGGFSKESILPKRNSDKLIARKKDWDPKKYGGFDSPTVAYSVLVVAKVEKGKSKKLKSVKELLGITIMERSSFEKNPIDFLEAKGYKEVKKDLIIKLPKYSLFELENGRKRMLASAGELQKGNELALPSKYVNFLYLASHYEKLKGSPEDNEQKQLFVEQHKHYLDEIIEQISEFSKRVILADANLDKVLSAYNKHRDKPIREQAENIIHLFTLTNLGAPAAFKYFDTTIDRKRYTSTKEVLDATLIHQSITGLYETRIDLSQLGGDGGSMSSETGPVAVDPTLRRRIEPHEFEVFFDPRELRKETCLLYEINWGGRHSIWRHTSQNTNKHVEVNFIEKFTTERYFCPNTRCSITWFLSWSPCGECSRAITEFLSRYPHVTLFIYIARLYHHADPRNRQGLRDLISSGVTIQIMTEQESGYCWRNFVNYSPSNEAHWPRYPHLWVRLYVLELYCIILGLPPCLNILRRKQPQLTFFTIALQSCHYQRLPPHILWATGLK

SEQ ID NO: 152 - protein, 1605 aa, Artificial Sequence
  Synthetic Polypeptide
DKKYSIGLAIGTNSVGWAVITDEYKVPSKKFKVLGNTDRHSIKKNLIGALLFDSGETAEATRLKRTARRRYTRRKNRICYLQEIFSNEMAKVDDSFFHRLEESFLVEEDKKHERHPIFGNIVDEVAYHEKYPTIYHLRKKLVDSTDKADLRLIYLALAHMIKFRGHFLIEGDLNPDNSDVDKLFIQLVQTYNQLFEENPINASGVDAKAILSARLSKSRRLENLIAQLPGEKKNGLFGNLIALSLGLTPNFKSNFDLAEDAKLQLSKDTYDDDLDNLLAQIGDQYADLFLAAKNLSDAILLSDILRVNTEITKAPLSASMIKRYDEHHQDLTLLKALVRQQLPEKYKEIFFDQSKNGYAGYIDGGASQEEFYKFIKPILEKMDGTEELLVKLNREDLLRKQRTFDNGSIPHQIHLGELHAILRRQEDFYPFLKDNREKIEKILTFRIPYYVGPLARGNSRFAWMTRKSEETITPWNFEEVVDKGASAQSFIERMTNFDKNLPNEKVLPKHSLLYEYFTVYNELTKVKYVTEGMRKPAFLSGEQKKAIVDLLFKTNRKVTVKQLKEDYFKKIECFDSVEISGVEDRFNASLGTYHDLLKIIKDKDFLDNEENEDILEDIVLTLTLFEDREMIEERLKTYAHLFDDKVMKQLKRRRYTGWGRLSRKLINGIRDKQSGKTILDFLKSDGFANRNFMQLIHDDSLTFKEDIQKAQVSGQGDSLHEHIANLAGSPAIKKGILQTVKVVDELVKVMGRHKPENIVIEMARENQTTQKGQKNSRERMKRIEEGIKELGSQILKEHPVENTQLQNEKLYLYYLQNGRDMYVDQELDINRLSDYDVDAIVPQSFLKDDSIDNKVLTRSDKNRGKSDNVPSEEVVKKMKNYWRQLLNAKLITQRKFDNLTKAERGGLSELDKAGFIKRQLVETRQITKHVAQILDSRMNTKYDENDKLIREVKVITLKSKLVSDFRKDFQFYKVREINNYHHAHDAYLNAVVGTALIKKYPKLESEFVYGDYKVYDVRKMIAKSEQEIGKATAKYFFYSNIMNFFKTEITLANGEIRKRPLIETNGETGEIVWDKGRDFATVRKVLSMPQVNIVKKTEVQTGGFSKESILPKRNSDKLIARKKDWDPKKYGGFDSPTVAYSVLVVAKVEKGKSKKLKSVKELLGITIMERSSFEKNPIDFLEAKGYKEVKKDLIIKLPKYSLFELENGRKRMLASAGELQKGNELALPSKYVNFLYLASHYEKLKGSPEDNEQKQLFVEQHKHYLDEIIEQISEFSKRVILADANLDKVLSAYNKHRDKPIREQAENIIHLFTLTNLGAPAAFKYFDTTIDRKRYTSTKEVLDATLIHQSITGLYETRIDLSQLGGDGGSGGSGGSMSSETGPVAVDPTLRRRIEPHEFEVFFDPRELRKETCLLYEINWGGRHSIWRHTSQNTNKHVEVNFIEKFTTERYFCPNTRCSITWFLSWSPCGECSRAITEFLSRYPHVTLFIYIARLYHHADPRNRQGLRDLISSGVTIQIMTEQESGYCWRNFVNYSPSNEAHWPRYPHLWVRLYVLELYCIILGLPPCLNILRRKQPQLTFFTIALQSCHYQRLPPHILWATGLK

SEQ ID NO: 153 - protein, 1612 aa, Artificial Sequence
  Synthetic Polypeptide
MSSETGPVAVDPTLRRRIEPHEFEVFFDPRELRKETCLLYEINWGGRHSIWRHTSQNTNKHVEVNFIEKFTTERYFCPNTRCSITWFLSWSPCGECSRAITEFLSRYPHVTLFIYIARLYHHADPRNRQGLRDLISSGVTIQIMTEQESGYCWRNFVNYSPSNEAHWPRYPHLWVRLYVLELYCIILGLPPCLNILRRKQPQLTFFTIALQSCHYQRLPPHILWATGLKSGSETPGTSESATPESDKKYSIGLAIGTNSVGWAVITDEYKVPSKKFKVLGNTDRHSIKKNLIGALLFDSGETAEATRLKRTARRRYTRRKNRICYLQEIFSNEMAKVDDSFFHRLEESFLVEEDKKHERHPIFGNIVDEVAYHEKYPTIYHLRKKLVDSTDKADLRLIYLALAHMIKFRGHFLIEGDLNPDNSDVDKLFIQLVQTYNQLFEENPINASGVDAKAILSARLSKSRRLENLIAQLPGEKKNGLFGNLIALSLGLTPNFKSNFDLAEDAKLQLSKDTYDDDLDNLLAQIGDQYADLFLAAKNLSDAILLSDILRVNTEITKAPLSASMIKRYDEHHQDLTLLKALVRQQLPEKYKEIFFDQSKNGYAGYIDGGASQEEFYKFIKPILEKMDGTEELLVKLNREDLLRKQRTFDNGSIPHQIHLGELHAILRRQEDFYPFLKDNREKIEKILTFRIPYYVGPLARGNSRFAWMTRKSEETITPWNFEEVVDKGASAQSFIERMTNFDKNLPNEKVLPKHSLLYEYFTVYNELTKVKYVTEGMRKPAFLSGEQKKAIVDLLFKTNRKVTVKQLKEDYFKKIECFDSVEISGVEDRFNASLGTYHDLLKIIKDKDFLDNEENEDILEDIVLTLTLFEDREMIEERLKTYAHLFDDKVMKQLKRRRYTGWGRLSRKLINGIRDKQSGKTILDFLKSDGFANRNFMQLIHDDSLTFKEDIQKAQVSGQGDSLHEHIANLAGSPAIKKGILQTVKVVDELVKVMGRHKPENIVIEMARENQTTQKGQKNSRERMKRIEEGIKELGSQILKEHPVENTQLQNEKLYLYYLQNGRDMYVDQELDINRLSDYDVDAIVPQSFLKDDSIDNKVLTRSDKNRGKSDNVPSEEVVKKMKNYWRQLLNAKLITQRKFDNLTKAERGGLSELDKAGFIKRQLVETRQITKHVAQILDSRMNTKYDENDKLIREVKVITLKSKLVSDFRKDFQFYKVREINNYHHAHDAYLNAVVGTALIKKYPKLESEFVYGDYKVYDVRKMIAKSEQEIGKATAKYFFYSNIMNFFKTEITLANGEIRKRPLIETNGETGEIVWDKGRDFATVRKVLSMPQVNIVKKTEVQTGGFSKESILPKRNSDKLIARKKDWDPKKYGGFDSPTVAYSVLVVAKVEKGKSKKLKSVKELLGITIMERSSFEKNPIDFLEAKGYKEVKKDLIIKLPKYSLFELENGRKRMLASAGELQKGNELALPSKYVNFLYLASHYEKLKGSPEDNEQKQLFVEQHKHYLDEIIEQISEFSKRVILADANLDKVLSAYNKHRDKPIREQAENIIHLFTLTNLGAPAAFKYFDTTIDRKRYTSTKEVLDATLIHQSITGLYETRIDLSQLGGD

SEQ ID NO: 154 - protein, 772 aa, Artificial Sequence
  Synthetic Polypeptide
MGSSHHHHHHMSSETGPVAVDPTLRRRIEPHEFEVEFDPRELRKETCLLYEINWGGRHSIWRHTSQNTNKHVEVNFIEKFTTERYFCPNTRCSITWFLSWSPCGECSRAITEFLSRYPHVTLFIYIARLYHHADPRNRQGLVKVMGRHKPENIVIEMARENQTTQKGQKNSRERMKRIEEGIKELGSQILKEHPVENTQLQNEKLYLYYLQNGRDMYVDQELDINRLSDYDVDAIVPQSFLKDDSIDNKVLTRSDKNRGKSDNVPSEEVVKKMKNYWRQLLNAKLITQRKFDNLTKAERGGLSELDKAGFIKRQLVETRQITKHVAQILDSRMNTKYDENDKLIREVKVITLKSKLVSDFRKDFQFYKVREINNYHHAHDAYLNAVVGTALIKKYPKLESEFVYGDYKVYDVRKMIAKSEQEIGKATAKYFFYSNIMNFFKTEILANGEIRKRPLIETNGETGEIVWDKGRDFATVRKVLSMPQVNIVKKTEVQTGGFSKESILPKRNSDKLIARKKDWDPKKYGGFDSPTVAYSVLVVAKVEKGKSKKLKSVKELLGITIMERSSFEKNPIDFLEAKGYKEVKKDLIIKLPKYSLFELENGRKRMLASAGELQKGNELALPSKYVNFLYLASHYEKLKGSPEDNEQKQLFVEQHKHYLDEIIEQISEFSKRVILADANLDKVLSAYNKHRDKPIREQAENIIHLFTLTNLGAPAAFKYFDTTIDRKRYTSTKEVLDATLIHQSITGLYETRIDLSQLGGDSGGSPKKKRKV

SEQ ID NO: 155 - protein, 1622 aa, Artificial Sequence
  Synthetic Polypeptide
MSSETGPVAVDPTLRRRIEPHEFEVFFDPRELRKETCLLYEINWGGRHSIWRHTSQNTNKHVEVNFIEKFTTERYFCPNTRCSITWFLSWSPCGECSRAITEFLSRYPHVTLFIYIARLYHHADPRNRQGLRDLISSGVTIQIMTEQESGYCWRNFVNYSPSNEAHWPRYPHLWVRLYVLELYCIILGLPPCLNILRRKQPQLTFFTIALQSCHYQRLPPHILWATGLKSGSETPGTSESATPESDKKYSIGLAIGTNSVGWAVITDEYKVPSKKFKVLGNTDRHSIKKNLIGALLFDSGETAEATRLKRTARRRYTRRKNRICYLQEIFSNEMAKVDDSFFHRLEESFLVEEDKKHERHPIFGNIVDEVAYHEKYPTIYHLRKKLVDSTDKADLRLIYLALAHMIKFRGHFLIEGDLNPDNSDVDKLFIQLVQTYNQLFEENPINASGVDAKAILSARLSKSRRLENLIAQLPGEKKNGLFGNLIALSLGLTPNFKSNFDLAEDAKLQLSKDTYDDDLDNLLAQIGDQYADLFLAAKNLSDAILLSDILRVNTEITKAPLSASMIKRYDEHHQDLTLLKALVRQQLPEKYKEIFFDQSKNGYAGYIDGGASQEEFYKFIKPILEKMDGTEELLVKLNREDLLRKQRTFDNGSIPHQIHLGELHAILRRQEDFYPFLKDNREKIEKILTFRIPYYVGPLARGNSRFAWMFRKSEETITPWNFEEVVDKGASAQSFIERMTNFDKNLPNEKVLPKHSLLYEYFTVYNELTKVKYVTEGMRKPAFLSGEQKKAIVDLLFKTNRKVTVKQLKEDYFKKIECFDSVEISGVEDRFNASLGTYHDLLKIIKDKDFLDNEENEDILEDIVLTLTLFEDREMIEERLKTYAHLFDDKVMKQLKRRRYTGWGRLSKLINGIRDKQSGKTILDFLKSDGFANRNFMQLIHDDSLTFKEDIQKAQVSGQGDSLHEHIANLAGSPAIKKGILQTVKVVDELVKVMGRHKPENIVIEMARENQTTQKGQKNSRERMKRIEEGIKELGSQILKEHPVENTQLQNEKLYLYYLQNGRDMYVDQELDINRLSDYDVDAIVPQSFLKDDSIDNKVLTRSDKNRGKSDNVPSEEVVKKMKNYWRQLLNAKLITQRKFDNLTKAERGGLSELDKAGFIKRQLVETRQITKHVAQILDSRMNTKYDENDKLIREVKVITLKSKLVSDFRKDFQFYKVREINNYHHAHDAYLNAVVGTALIKKYPKLESEFVYGDYKVYDVRKMIAKSEQEIGKATAKYFFYSNIMNFFKTEITLANGEIRKRPLIETNGETGEIVWDKGRDFATVRKVLSMPQVNIVKKTEVQTGGFSKESILPKRNSDKLIARKKDWDPKKYGGFDSPTVAYSVLVVAKVEKGKSKKLKSVKELLGITIMERSSFEKNPIDFLEAKGYKEVKKDLIIKLPKYSLFELENGRKRMLASAGELQKGNELALPSKYVNFLYLASHYEKLKGSPEDNEQKQLFVEQHKHYLDEIIEQISEFSKRVILADANLDKVLSAYNKHRDKPIREQAENIIHLFTLTNLGAPAAFKYFDTTIDRKRYTSTKEVLDATLIHQSITGLYETRIDLSQLGGDSGGSPKKKRKV

SEQ ID NO: 156 - protein, 1709 aa, Artificial Sequence
  Synthetic Polypeptide
MSSETGPVAVDPTLRRRIEPHEFEVFFDPRELRKETCLLYEINWGGRHSIWRHTSQNTNKHVEVNFIEKFTTERYFCPNTRCSITWFLSWSPCGECSRAITEFLSRYPHVTLFIYIARLYHHADPRNRQGLRDLISSGVTIQIMTEQESGYCWRNFVNYSPSNEAHWPRYPHLWVRLYVLELYCIILGLPPCLNILRRKQPQLTFFTIALQSCHYQRLPPHILWATGLKSGSETPGTSESATPESDKKYSIGLAIGTNSVGWAVITDEYKVPSKKFKVLGNTDRHSIKKNLIGALLFDSGETAEATRLKRTARRRYTRRKNRICYLQEIFSNEMAKVDDSFFHRLEESFLVEEDKKHERHPIFGNIVDEVAYHEKYPTIYHLRKKLVDSTDKADLRLIYLALAHMIKFRGHFLIEGDLNPDNSDVDKLFIQLVQTYNQLFEENPINASGVDAKAILSARLSKSRRLENLIAQLPGEKKNGLFGNLIALSLGLTPNFKSNFDLAEDAKLQLSKDTYDDDLDNLLAQIGDQYADLFLAAKNLSDAILLSDILRVNTEITKAPLSASMIKRYDEHHQDLTLLKALVRQQLPEKYEILFFDQSKNGYAGYIDGGASQEEFYKFIKPILEKMDGTEELLVKLNREDLLRKQRTFDNGSIPHQIHLGELHAILRRQEDFYPFLKDNREKIEKILTFRIPYYVGPLARGNSRFAWMTRKSEETITPWNFEEVVDKGASAQSFIERMTNFDKNLPNEKVLPKHSLLYEYFTVYNELYKVKYVTEGMRKPAFLSGEQKKAIVDLLFKTNRKVTVKQLKEDYFKKIECFDSVEISGVEDRFNASLGTYHDLLKIIKDKDFLDNEENEDILEDIVLTLTLFEDREMIEERLKTYAHLFDDKVMKQLKRRRYTGWGRLSRKLINGIRDKQSGKTILDFLKSDGFANRNFMQLIHDDSLTFKEDIQKAQVSGQGDSLHEHIANLAGSPAIKKGILQTVKVVDELVKVMGRHKPENIVIEMARENQTTQKGQKNSRERMKRIEEGIKELGSQILKEHPVENTQLQNEKLYLYYLQNGRDMYVDQELDINRLSDYDVDAIVPQSFLKDDSIDNKVLTRSDKNRGKSDNVPSEEVVKKMKNYWRQLLNAKLITQRKFDNLTKAERGGLSELDKAGFIKRQLVETRQITKHVAQILDSRMNTKYDENDKLIREVKVITLKSKLVSDFRKDFQFYKVREINNYHHAHDAYLNAVVGYALIKKYPKLESEFVYGDYKVYDVRKMIAKSEQEIGKATAKYFFYSNIMNFFKTEITLANGEIRKRPLIETNGETGEIVWDKGRDFATVRKVLSMPQVNIVKKTEVQTGGFSKESILPKRNSDKLIARKKDWDPKKYGGFDSPTVAYSVLVVAKVEKGKSKKLKSVKELLGITIMERSSFEKNPIDFLEAKGYKEVKKDLIIKLPKYSLFELENGRKRMLASAGELQKGNELALPSKYVNFLYLASHYEKLKGSPEDNEQKQLFVEQHKHYLDEIIEQISEFSKRVILADANLDKVLSAYNKHRDKPIREQAENIIHLFTLTNLGAPAAFKYFDTTIDRKRYTSTKEVLDATLIHQSITGLYETRIDLSQLGGDSGGSTNLSDIIEKETGKQLVIQESILMLPEEVEEVIGNKPESDILVHTAYDESTDENVMLLSDAPEYKPWALVIQDSNGENKIKMLSGGSPKKKRKV

SEQ ID NO: 157 - protein, 1708 aa, Artificial Sequence
  Synthetic Polypeptide
MSSETGPVAVDPTLRRRIEPHEFEVFFDPRELRKETCLLYEINWGGRHSIWRHTSQNTNKHVEVNFIEKFTTERYFCPNTRCSITWFLSWSPCGECSRAITEFLSRYPHVTLFIYIARLYHHADPRNRQGLRDLISSGVTIQIMTEQESGYCWRNFVNYSPSNEAHWPRYPHLWVRLYVLELYCIILGLPPCLNILRRKQPQLTFFTIALQSCHYQRLPPHILWATGLKSGSETPGTSESATPESDKKYSIGLAIGTNSVGWAVITDEYKVPSKKFKVLGNTDRHSIKKNLIGALFDSGETAEATRLKRTARRRYTRRKNRICYLQEIFSNEMAKVDDSFFHRLEESFLVEEDKKHERHPIFGNIVDEVAYHEKYPTIYHLRKKLVDSTDKADLRLIYLALAHMIKFRGHFLIEGDLNPDNSDVDKLFIQLVQTYNQLFEENPINASGVDAKAILSARLSKSRRLENLIAQLPGEKKNGLFGNLIALSLGLTPNFKSNFDLAEDAKLQLSKDTYDDDLDNLLAQIGDQYADLFLAAKNLSDAILLSDILRVNTEITKAPLSASMIKRYDEHHQDLTLLKALVRQQLPEKYKEIFFDQSKNGYAGYIDGGASQEEFYKFIKPILEKMDGTEELLVKLNREDLLRKQRTFDNGSIPHQIHLGELHAILRRQEDFYPFLKDNREDIEKILTFRIPYYVGPLARGNSRFAWMTRKSEETITPWNFEEVVDKGASAQSFIERMTNDKNLPNEKVLPKHSLLYEYFTVYNELTKVKYVTEGMRKPAFLSSGEQKKAIVDLLFKTNRKVTVKQLKEDYFKKIECFDSVEISGVEDRFNASLGTYGDLLKIIKDIDFLDNEENEDILEDIVLTLTLFEDREMIEERLKTYAHLFDDKVMKQLKRRRYTGWGRLSRKLINGIRDKQSGKTILDFLKSDGFANRNFMQLIHDDSLTFKEDIQKAQVSGQGDSLHEHIANLAGSPAIKKGILQTVKVVDELVKVMGRHKPENIVIEMARENQTTQKGQKNSRERMKRIEEGIKELGSQILKEHPVENTQLQNEKLYLYYLQNGRDMYVDQELDINRLSDYDVDHIVPQSFLKDDSIDNKVLTRSDKNRGKSDNVPSEEVVKKMKNYWRQLLNAKLITQRKFDLTKAERGGLSELDKAGFIKRQLVETRQITKHVAQILDSRMNTKYDENDKLIREVKVITLKSKLVSDFRKDFQFYKVREINNYHHAHDAYLNAVVGTALIKKYPKLESEFVYGDYKVYDVRKMIAKSEQEIGKATAKYFFYSNIMNFFKTEITLANGEIRKRPLIETNGETGEIVWDKGRDFATVRKVLSMPQVNIVKKTEVQTGGFSKESILPKRNSDKLIARKKDWDPKKYGGFDSPTVAYSVLVVAKVEKGKSKKLKSVKELLGITIMERSSFEKNPIDFLEAKGYKEVKKDLIIKLPKYSLFELENGRKRMLASAGELQKGNELALPSKYVNFLYLASHYEKLKGSPEDNEQKQLFVEQHKHYLDEIIEQISEFSKRVILADANLDKVLSAYNKHRDKPIREQAENIIHLFTLTNLGAPAAFKYFDTTIDRKRYTSTKEVLDATLIHQSITGLYETRIDLSQLGGDSGGSTNLSDIIEKETGKQLVIQESILMLPEEVEEVIGNKPESDILVHTAYDESTDENVMLLTSDAPEYKPWALVIQDSNGENKIKMLSGGSPKKKRKV

SEQ ID NO: 158 - protein, 1629 aa, Artificial Sequence
  Synthetic Polypeptide
MTSEKGPSTGDPTLRRRIEPWEFDVFYDPRELRKEACLLYEIKWGMSRKIWRSSGKNTTNHVEVNFIKKFTSERDFHPSMSCSITWFLSWSPCWECSQAIREFLSRHPGVTLVIYVARLFWHMDQQNRQGLRDLVNSGVTIQIMRASEYYHCWRNFVNYPPGDEAHWPQYPPLWMMLYALELHCIILSLPPCLKISRRWQNHLTFFRLHLQNCHYQTIPPHILLATGLIHPSVAWRGSETPGTSESATPESDKKYSIGLAIGTNSVGWAVITDEYKVPSKKFKVLGNTDRHSIKKNLIGALLFDSGETAEATRLKRTARRRYTRRKNRICYLQEIFSNEMAKVDDSFFHRLEESFLVEEDKKHERHPIFGNIVDEVAYHEKYPTIYHLRKKLVDSTDKADLRLIYLALAHMIKFRGHFLIEGDLNPDNSDVDKLFIQLVQTYNQLFEENPINASGVDAKAILSARLSKSRRLENLIAQLPGEKKNGLFGNLIALSLGLTPNFKSNFDLAEDAKLQLSKDTYDDDLDNLLAQIGDQYADLFLAAKNLSDAILLSDILRVNTEITKAPLSASMIKRYDEHHQDLTLLKALVRQQLPEKYKEIFFDQSKNGYAGYIDGGASQEEFYKFIKPILEKMDGTEELLVKLNREDLLRKQRTFDNGSIPHQIHLGELHAILRRQEDFYPFLKDNREKIEKILTFRIPYYVGPLARGNSRFAWMTRKSEETITPWNFEEVVDKGASAQSFIERMTNFDKNLPNEKVLPKHSLLYEYFTVYNELTKVKYVTEGMRKPAFLSGEQKKAIVDLLFKTNRKVTVKQLKEDYFKKIECFDSVEISGVEDRFNASLGTYHDLLKIIKDKDFLDNEENEDILEDIVLTLTLFEDREMIEERLKTYAHLFDDKVMKQLKRRRYTGWGRLSRKLINGIRDKQSGKTILDFLKSDGFANRNFMQLIHDDSLTFKEDIQKAQVSGQGDSLHEHIANLAGSPAIKKGILQTVKVVDELVKVMGRHKPENIVIEMARENQTTQKGQKNSRERMKRIEEGIKELGSQILKEHPVENTQLQNEKLYLYYLQNGRDMYVDQELDINRLSDYDVDAIVPQSFLKDDSIDNKVLTRSDKNRGKSDNVPSEEVVKKMKNYWRQLLNAKLITQRKFDNLTKAERGGLSELDKAGFIKRQLVETRQITKHVAQILDSRMNTKYDENDKLIREVKVITLKSKLVSDFRKDFQFYKVREINNYHHAHDAYLNAVVGTALIKKYPKLESEFVYGDYKVYDVRKMIAKSEQEIGKATAKYFFYSNIMNFFKTEITLANGEIRKRPLIETNGETGEIVWDKGRDFATVRKVLSMPQVNIVKKTEVQTGGFSKESILPKRNSDKLIARKKDWDPKKYGGFDSPTVAYSVLVVAKVEKGKSKKLKSVKELLGITIMERSSFEKNPIDFLEAKGYKEVKKDLIIKLPKYSLFELENGRKRMLASAGELQKGNELALPSKYVNFLYLASHYEKLKGSPEDNEQKQLFVEQHKHYLDEIIEQISEFSKRVILADANLDKVLSAYNKHRDKPIREQAENIIHLFTLTNLGAPAAFKYFDTTIDRKRYTSTKEVLDATLIHQSITGLYETRIDLSQLGGDSGGSPKKKRKV

SEQ ID NO: 159 - protein, 1679 aa, Artificial Sequence
  Synthetic Polypeptide
MTDAEYVRIHEKLDIYTFKKQFFNNKKSVSHRCYVLFELKRRGERRACFWGYAVNKPQSGTERGIHAEIFSIRKVEEYLRDNPGQFTINWYSSWSPCADCAEKILEWYNQELRGNGHTLKIWACKLYYEKNARNQIGLWNLRDNGVGLNVMVSEHYQCCRKIFIQSSHNQLNENRWLEKTLKRAEKRRSELSIMIQVKILHTTKSPAVSGSETPGTSESATPESDKKYSIGLAIGTNSVGWAVITDEYKVPSKKFKVLGNTDRHSIKKNLIGALLFDSGETAEATRLKRTARRRYTRRKNRICYLQEIFSNEMAKVDDSFFHRLEESFLVEEDKKHERHPIFGNIVDEVAYHEKYPTIYHLRKKLVDSTDKADLRLIYLALAHMIKFRGHFLIEGDLNPDNSDVDKLFIQLVQTYNQLFEENPINASGVDAKAILSARLSKSRRLENLIAQLPGEKKNGLFGNLIALSLGLTPNFKSNFDLAEDAKLQLSKDTYDDDLDNLLAQIGDQYADLFLAAKNLSDAILLSDILRVNTEITKAPLSASMIKRYDEHHQDLTLLKALVRQQLPEKYKEIFFDQSKNGYAGYIDGGASQEEFYKFIKPILEKMDGTEELLVKLNREDLLRKQRTFDNGSIPHQIHLGELHAILRRQEDFYPFLKDNREKIEKILTFRIPYYVGPLARGNSRFAWMTRKSEETITPWNFEEVVDKGASAQSFIERMTNFDKNLPNEKVLPKHSLLYEYFTVYNELTKVKYVTEGMRKPAFLSGEQKKAIVDLLFKTNRKVTVKQLKEDYFKKIECFDSVEISGVEDRFNASLGTYHDLLKIIKDKDFLDNEENEDILEDIVLTLTLFEDREMIEERLKTYAHLFDDKVMKQLKRRRYTGWGRLSRKLINGIRDKQSGKTILDFLKSDGFANRNFMQLIHDDSLTFKEDIQKAQVSGQGDSLHEHIANLAGSPAIKKGILQTVKVVDELVKVMGRHKPENIVIEMARENQTTQKGQKNSRERMKRIEEGIKELGSQILKEHPVENTQLQNEKLYLYYLQNGRDMYVDQELDINRLSDYDVDAIVPQSFLKDDSIDNKVLTRSDKNRGKSDNVPSEEVVKKMKNYWRQLLNAKLITQRKFDNLTKAERGGLSELDKAGFIKRQLVETRQITKHVAQILDSRMNTKYDENDKLIREVKVITLKSKLVSDFRKDFQFYKVREINNYHHAHDAYLNAVVGTALIKKYPKLESEFVYGDYKVYDVRKMIAKSEQEIGKATAKYFFYSNIMNFFKTEITLANGEIRKRPLIETNGETGEIVWDKGRDFATVRKVLSMPQVNIVKKTEVQTGGFSKESILPKRNSDKLIARKKDWDPKKYGGFDSPTVAYSVLVVAKVEKGKSKKLKSVKELLGITIMERSSFEKNPIDFLEAKGYKEVKKDLIIKLPKYSLFELENGRKRMLASAGELQKGNELALPSKYVNFLYLASHYEKLKGSPEDNEQKQLFVEQHKHYLDEIIEQISEFSKRVILADANLDKVLSAYNKHRDKPIREQAENIIHLFTLTNLGAPAAFKYFDTTIDRKRYTSTKEVLDATLIHQSITGLYETRIDLSQLGGDSGGSMTNLSDIIEKETGKQLVIQESILMLPEEVEEVIGNKPESDILVHTAYDESTDENVMLLTSDAPEYKPWALVIQDSNGENKIKML

SEQ ID NO: 160 - protein, 1689 aa, Artificial Sequence
  Synthetic Polypeptide
MTDAEYVRIHEKLDIYTFKKQFFNNKKSVSHRCYVLFELKRRGERRACFWGYAVNKPQSGTERGIHAEIFSIRKVEEYLRDNPGQFTINWYSSWSPCADCAEKILEWYNQELRGNGHTLKIWACKLYYEKNARNQIGLWNLRDNGVGLNVMVSEHYQCCRKIFIQSSHNQLNENRWLEKTLKRAEKRRSELSIMIQVKILHTTKSPAVSGSETPGTSESATPESDKKYSIGLAIGTNSVGWAVITDEYKVPSKKFKVLGNTDRHSIKKNLIGALLFDSGETAEATRLKRTARRRYTRRKNRICYLQEIFSNEMAKVDDSFFHRLEESFLVEEDKKHERHPIFGNIVDEVAYHEKYPTIYHLRKKLVDSTDKADLRLIYLALAHMIKFRGHFLIEGDLNPDNSDVDKLFIQLVQTYNQLFEENPINASGVDAKAILSARLSKSRRLENLIAQLPGEKKNGLFGNLIALSLGLTPNFKSNFDLAEDAKLQLSKDTYDDDLDNLLAQIGDQYADLFLAAKNLSDAILLSDILRVNTEITKAPLSASMIKRYDEHHQDLTLLKALVRQQLPEKYKEIFFDQSKNGYAGYIDGGASQEEFYKFIKPILEKMDGTEELLVKLNREDLLRKQRTFDNGSIPHQIHLGELHAILRRQEDFYPFLKDNREKIEKILTFRIPYYVGPLARGNSRFAWMTRKSEETITPWNFEEVVDKGASAQSFIERMTNFDKNLPNEKVLPKHSLLYEYFTVYNELTKVKYVTEGMRKPAFLSGEQKKAIVDLLFKTNRKVTVKQLKEDYFKKIECFDSVEISGVEDRFNASLGTYHDLLKIIKDKDFLDNEENEDILEDIVLTLTLFEDREMIEERLKTYAHLFDDKVMKQLKRRRYTGWGRLSRKLINGIRDKQSGKTILDFLKSDGFANRNFMQLIHDDSLTFKEDIQKAQVSGQGDSLHEHIANLAGSPAIKKGILQTVKVVDELVKVMGRHKPENIVIEMARENQTTQKGQKNSRERMKRIEEGIKELGSQILKEHPVENTQLQNEKLYLYYLQNGRDMYVDQELDINRLSDYDVDHIVPQSFLKDDSIDNKVLTRSDKNRGKSDNVPSEEVVKKMKNYWRQLLNAKLITQRKFDNLTKAERGGLSELDKAGFIKRQLVETRQITKHVAQILDSRMNTKYDENDKLIREVKVITLKSKLVSDFRKDFQFYKVREINNYHHAHDAYLNAVVGTALIKKYPKLESEFVYGDYKVYDVRKMIAKSEQEIGKATAKYFFYSNIMNFFKTEITLANGEIRKRPLIETNGETGEIVWDKGRDFATVRKVLSMPQVNIVKKTEVQTGGFSKESILPKRNSDKLIARKKDWDPKKYGGFDSPTVAYSVLVVAKVEKGKSKKLKSVKELLGITIMERSSFEKNPIDFLEAKGYKEVKKDLIIKLPKYSLFELENGRKRMLASAGELQKGNELALPSKYVNFLYLASHYEKLKGSPEDNEQKQLFVEQHKHYLDEIIEQISEFSKRVILADANLDKVLSAYNKHRDKPIREQAENIIHLFTLTNLGAPAAFKYFDTTIDRKRYTSTKEVLDATLIHQSITGLYETRIDLSQLGGDSGGSTNLSDIIEKETGKQLVIQESILMLPEEVEEVIGNKPESDILVHTAYDESTDENVMLLTSDAPEYKPWALVIQDSNGENKIKMLSGGSPKKKRKV

SEQ ID NO: 161 - protein, 1655 aa, Artificial Sequence
  Synthetic Polypeptide
MDPPTFTFNFNNEPWVRGRHETYLCYEVERMHNDTWVLLNQRRGFLCNQAPHKHGFLEGRHAELCFLDVIPFWKLDLDQDYRVTCFTSWSPCFSCAQEMAKFISKNKHVSLCIFTARIYDDQGRCQEGLRTLAEAGAKISIMTYSEFKHCWDTFVDHQGCPFQPWDGLDEHSQDLSGRLRAILQSGSETPGTSESATPESDKKYSIGLAIGTNSVGWAVITDEYKVPSKKFKVLGNTDRHSIKKNLIGALLFDSGETAEATRLKRTARRRYTRRKNRICYLQEIFSNEMAKVDDSFFHRLEESFLVEEDKKHERHPIFGNIVDEVAYHEKYPTIYHLRKKLVDSTDKADLRLIYLALAHMIKFRGHFLIEGDLNPDNSDVDKLFIQLVQTYNQLFEENPINASGVDAKAILSARLSKSRRLENLIAQLPGEKKNGLFGNLIALSLGLTPNFKSNFDLAEDAKLQLSKDTYDDDLDNLLAQIGDQYADLFLAAKNLSDAILLSDILRVNTEITKAPLSASMIKRYDEHHQDLTLLKALVRQQLPEKYKEIFFDQSKNGYAGYIDGGASQEEFYKFIKPILEKMDGTEELLVKLNREDLLRKQRTFDNGSIPHQIHLGELHAILRRQEDFYPFLKDNREKIEKILTFRIPYYVGPLARGNSRFAWMTRKSEETITPWNFEEVVDKGASAQSFIERMTNFDKNLPNEKVLPKHSLLYEYFTVYNELTKVKYVTEGMRKPAFLSGEQKKAIVDLLFKTNRKVTVKQLKEDYFKKIECFDSVEISGVEDRFNASLGTYHDLLKIIKDKDFLDNEENEDILEDIVLTLTLFEDREMIEERLKTYAHLFDDKVMKQLKRRRYTGWGRLSRKLINGIRDKQSGKTILDFLKSDGFANRNFMQLIHDDSLTFKEDIQKAQVSGQGDSLHEHIANLAGSPAIKKGILQTVKVVDELVKVMGRHKPENIVIEMARENQTTQKGQKNSRERMKRIEEGIKELGSQILKEHPVENTQLQNEKLYLYYLQNGRDMYVDQELDINRLSDYDVDAIVPQSFLKDDSIDNKVLTRSDKNRGKSDNVPSEEVVKKMKNYWRQLLNAKLITQRKFDNLTKAERGGLSELDKAGFIKRQLVETRQITKHVAQILDSRMNTKYDENDKLIREVKVITLKSKLVSDFRKDFQFYKVREINNYHHAHDAYLNAVVGTALIKKYPKLESEFVYGDYKVYDVRKMIAKSEQEIGKATAKYFFYSNIMNFFKTEITLANGEIRKRPLIETNGETGEIVWDKGRDFATVRKVLSMPQVNIVKKTEVQTGGFSKESILPKRNSDKLIARKKDWDPKKYGGFDSPTVAYSVLVVAKVEKGKSKKLKSVKELLGITIMERSSFEKNPIDFLEAKGYKEVKKDLIIKLPKYSLFELENGRKRMLASAGELQKGNELALPSKYVNFLYLASHYEKLKGSPEDNEQKQLFVEQHKHYLDEIIEQISEFSKRVILADANLDKVLSAYNKHRDKPIREQAENIIHLFTLTNLGAPAAFKYFDTTIDRKRYTSTKEVLDATLIHQSITGLYETRIDLSQLGGDSGGSMTNLSDIIEKETGKQLVIQESILMLPEEVEEVIGNKPESDILVHTAYDESTDENVMLLTSDAPEYKPWALVIQDSNGENKIKML

SEQ ID NO: 162 - protein, 1665 aa, Artificial Sequence
  Synthetic Polypeptide
MDPPTFTFNFNNEPWVRGRHETYLCYEVERMHNDTWVLLNQRRGFLCNQAPHKHGFLEGRHAELCFLDVIPFWKLDLDQDYRVTCFTSWSPCFSCAQEMAKFISKNKHVSLCIFTARIYDDQGRCQEGLRTLAEAGAKISIMTYSEFKHCWDTFVDHQGCPFQPWDGLDEHSQDLSGRLRAILQSGSETPGTSESATPESDKKYSIGLAIGTNSVGWAVITDEYKVPSKKFKVLGNTDRHSIKKNLIGALLFDSGETAEATRLKRTARRRYTRRKNRICYLQEIFSNEMAKVDDSFFHRLEESFLVEEDKKHERHPIFGNIVDEVAYHEKYPTIYHLRKKLVDSTDKADLRLIYLALAHMIKFRGHFLIEGDLNPDNSDVDKLFIQLVQTYNQLFEENPINASGVDAKAILSARLSKSRRLENLIAQLPGEKKNGLFGNLIALSLGLTPNFKSNFDLAEDAKLQLSKDTYDDDLDNLLAQIGDQYADLFLAAKNLSDAILLSDILRVNTEITKAPLSASMIKRYDEHHQDLTLLKALVRQQLPEKYKEIFFDQSKNGYAGYIDGGASQEEFYKFIKPILEKMDGTEELLVKLNREDLLRKQRTFDNGSIPHQIHLGELHAILRRQEDFYPFLKDNREKIEKILTFRIPYYVGPLARGNSRFAWMTRKSEETITPWNFEEVVDKGASAQSFIERMTNFDKNLPNEKVLPKHSLLYEYFTVYNELTKVKYVTEGMRKPAFLSGEQKKAIVDLLFKTNRKVTVKQLKEDYFKKIECFDSVEISGVEDRFNASLGTYHDLLKIIKDKDFLDNEENEDILEDIVLTLTLFEDREMIEERLKTYAHLFDDKVMKQLKRRRYTGWGRLSRKLINGIRDKQSGKTILDFLKSDGFANRNFMQLIHDDSLTFKEDIQKAQVSGQGDSLHEHIANLAGSPAIKKGILQTVKVVDELVKVMGRHKPENIVIEMARENQTTQKGQKNSRERMKRIEEGIKELGSQILKEHPVENTQLQNEKLYLYYLQNGRDMYVDQELDINRLSDYDVDHIVPQSFLKDDSIDNKVLTRSDKNRGKSDNVPSEEVVKKMKNYWRQLLNAKLITQRKFDNLTKAERGGLSELDKAGFIKRQLVETRQITKHVAQILDSRMNTKYDENDKLIREVKVITLKSKLVSDFRKDFQFYKVREINNYHHAHDAYLNAVVGTALIKKYPKLESEFVYGDYKVYDVRKMIAKSEQEIGKATAKYFFYSNIMNFFKTEITLANGEIRKRPLIETNGETGEIVWDKGRDFATVRKVLSMPQVNIVKKTEVQTGGFSKESILPKRNSDKLIARKKDWDPKKYGGFDSPTVAYSVLVVAKVEKGKSKKLKSVKELLGITIMERSSFEKNPIDFLEAKGYKEVKKDLIIKLPKYSLFELENGRKRMLASAGELQKGNELALPSKYVNFLYLASHYEKLKGSPEDNEQKQLFVEQHKHYLDEIIEQISEFSKRVILADANLDKVLSAYNKHRDKPIREQAENIIHLFTLTNLGAPAAFKYFDTTIDRKRYTSTKEVLDATLIHQSITGLYETRIDLSQLGGDSGGSTNLSDIIEKETGKQLVIQESILMLPEEVEEVIGNKPESDILVHTAYDESTDENVMLLTSDAPEYKPWALVIQDSNGENKIKMLSGGSPKKKRKV

SEQ ID NO: 163 - protein, 1665 aa, Artificial Sequence
  Synthetic Polypeptide
MDPPTFTFNFNNEPWVRGRHETYLCYEVERMHNDTWVLLNQRRGFLCNQAPHKHGFLEGRHAELCFLDVIPFWKLDLDQDYRVTCFTSWSPCFSCAQEMAKFISKNKHVSLCIFTARIYRRQGRCQEGLRTLAEAGAKISIMTYSEFKHCWDTFVDHQGCPFQPWDGLDEHSQDLSGRLRAILQSGSETPGTSESATPESDKKYSIGLAIGTNSVGWAVITDEYKVPSKKFKVLGNTDRHSIKKNLIGALLFDSGETAEATRLKRTARRRYTRRKNRICYLQEIFSNEMAKVDDSFFHRLEESFLVEEDKKHERHPIFGNIVDEVAYHEKYPTIYHLRKKLVDSTDKADLRLIYLALAHMIKFRGHFLIEGDLNPDNSDVDKLFIQLVQTYNQLFEENPINASGVDAKAILSARLSKSRRLENLIAQLPGEKKNGLFGNLIALSLGLTPNFKSNFDLAEDAKLQLSKDTYDDDLDNLLAQIGDQYADLFLAAKNLSDAILLSDILRVNTEITKAPLSASMIKRYDEHHQDLTLLKALVRQQLPEKYKEIFFDQSKNGYAGYIDGGASQEEFYKFIKPILEKMDGTEELLVKLNREDLLRKQRTFDNGSIPHQIHLGELHAILRRQEDFYPFLKDNREKIEKILTFRIPYYVGPLARGNSRFAWMTRKSEETITPWNFEEVVDKGASAQSFIERMTNFDKNLPNEKVLPKHSLLYEYFTVYNELTKVKYVTEGMRKPAFLSGEQKKAIVDLLFKTNRKVTVKQLKEDYFKKIECFDSVEISGVEDRFNASLGTYHDLLKIIKDKDFLDNEENEDILEDIVLTLTLFEDREMIEERLKTYAHLFDDKVMKQLKRRRYTGWGRLSRKLINGIRDKQSGKTILDFLKSDGFANRNFMQLIHDDSLTFKEDIQKAQVSGQGDSLHEHIANLAGSPAIKKGILQTVKVVDELVKVMGRHKPENIVIEMARENQTTQKGQKNSRERMKRIEEGIKELGSQILKEHPVENTQLQNEKLYLYYLQNGRDMYVDQELDINRLSDYDVDHIVPQSFLKDDSIDNKVLTRSDKNRGKSDNVPSEEVVKKMKNYWRQLLNAKLITQRKFDNLTKAERGGLSELDKAGFIKRQLVETRQITKHVAQILDSRMNTKYDENDKLIREVKVITLKSKLVSDFRKDFQFYKVREINNYHHAHDAYLNAVVGTALIKKYPKLESEFVYGDYKVYDVRKMIAKSEQEIGKATAKYFFYSNIMNFFKTEITLANGEIRKRPLIETNGETGEIVWDKGRDFATVRKVLSMPQVNIVKKTEVQTGGFSKESILPKRNSDKLIARKKDWDPKKYGGFDSPTVAYSVLVVAKVEKGKSKKLKSVKELLGITIMERSSFEKNPIDFLEAKGYKEVKKDLIIKLPKYSLFELENGRKRMLASAGELQKGNELALPSKYVNFLYLASHYEKLKGSPEDNEQKQLFVEQHKHYLDEIIEQISEFSKRVILADANLDKVLSAYNKHRDKPIREQAENIIHLFTLTNLGAPAAFKYFDTTIDRKRYTSTKEVLDATLIHQSITGLYETRIDLSQLGGDSGGSTNLSDIIEKETGKQLVIQESILMLPEEVEEVIGNKPESDILVHTAYDESTDENVMLLTSDAPEYKPWALVIQDSNGENKIKMLSGGSPKKKRKV

SEQ ID NO: 164 - DNA, 246 bp, Artificial Sequence
  Synthetic Polynucleotide
gcggacatggaggacgtgcgcggccgcctggtgcagtaccgcggcgaggtgcaggccatgctcggccagagcaccgaggagctgcgggtgcgcctcgcctcccacctgcgcaagctgcgtaagcggctcctccgcgatgccgatgacctgcagaagcgcctggcagtgtaccaggccggggcccgcgagggcgccgagcgcggcctcagcgccatccgcgagcgcctggggcccctggtggaacag

SEQ ID NO: 165 - protein, 1689 aa, Artificial Sequence; identical to SEQ ID NO: 160
  Synthetic Polypeptide

SEQ ID NO: 166 - protein, 1679 aa, Artificial Sequence
  Synthetic Polypeptide
MDSLLMNRRKFLYQFKNVRWAKGRRETYLCYVVKRRDSATSFSLDFGYLRNKNGCHVELLFLRYISDWDLDPGRCYRVTWFTSWSPCYDCARHVADFLRGNPNLSLRIFTARLYFCEDRKAEPEGLRRLHRAGVQIAIMTFKDYFYCWNTFVENHERTFKAWEGLHENSVRLSRQLRRILLPLYEVDDLRDAFRTLGLSGSETPGTSESATPESDKKYSIGLAIGTNSVGWAVITDEYKVPSKKFKVLGNTDRHSIKKNLIGALLFDSGETAEATRLKRTARRRYTRRKNRICYLQEIFSNEMAKVDDSFFHRLEESFLVEEDKKHERHPIFGNIVDEVAYHEKYPTIYHLRKKLVDSTDKADLRLIYLALAHMIKFRGHFLIEGDLNPDNSDVDKLFIQLVQTYNQLFEENPINASGVDAKAILSARLSKSRRLENLIAQLPGEKKNGLFGNLIALSLGLTPNFKSNFDLAEDAKLQLSKDTYDDDLDNLLAQIGDQYADLFLAAKNLSDAILLSDILRVNTEITKAPLSASMIKRYDEHHQDLTLLKALVRQQLPEKYKEIFFDQSKNGYAGYIDGGASQEEFYKFIKPILEKMDGTEELLVKLNREDLLRKQRTFDNGSIPHQIHLGELHAILRRQEDFYPFLKDNREKIEKILTFRIPYYVGPLARGNSRFAWMTRKSEETITPWNFEEVVDKGASAQSFIERMTNFDKNLPNEKVLPKHSLLYEYFTVYNELTKVKYVTEGMRKPAFLSGEQKKAIVDLLFKTNRKVTVKQLKEDYFKKIECFDSVEISGVEDRFNASLGTYHDLLKIIKDKDFLDNEENEDILEDIVLTLTLFEDREMIEERLKTYAHLFDDKVMKQLKRRRYTGWGRLSRKLINGIRDKQSGKTILDFLKSDGFANRNFMQLIHDDSLTFKEDIQKAQVSGQGDSLHEHIANLAGSPAIKKGILQTVKVVDELVKVMGRHKPENIVIEMARENQTTQKGQKNSRERMKRIEEGIKELGSQILKEHPVENTQLQNEKLYLYYLQNGRDMYVDQELDINRLSDYDVDHIVPQSFLKDDSIDNKVLTRSDKNRGKSDNVPSEEVVKKMKNYWRQLLNAKLITQRKFDNLTKAERGGLSELDKAGFIKRQLVETRQITKHVAQILDSRMNTKYDENDKLIREVKVITLKSKLVSDFRKDFQFYKVREINNYHHAHDAYLNAVVGTALIKKYPKLESEFVYGDYKVYDVRKMIAKSEQEIGKATAKYFFYSNIMNFFKTEITLANGEIRKRPLIETNGETGEIVWDKGRDFATVRKVLSMPQVNIVKKTEVQTGGFSKESILPKRNSDKLIARKKDWDPKKYGGFDSPTVAYSVLVVAKVEKGKSKKLKSVKELLGITIMERSSFEKNPIDFLEAKGYKEVKKDLIIKLPKYSLFELENGRKRMLASAGELQKGNELALPSKYVNFLYLASHYEKLKGSPEDNEQKQLFVEQHKHYLDEIIEQISEFSKRVILADANLDKVLSAYNKHRDKPIREQAENIIHLFTLTNLGAPAAFKYFDTTIDRKRYTSTKEVLDATLIHQSITGLYETRIDLSQLGGDSGGSTNLSDIIEKETGKQLVIQESILMLPEEVEEVIGNKPESDILVHTAYDESTDENVMLLTSDAPEYKPWALVIQDSNGENKIKMLSGGSPKKKRKV

SEQ ID NO: 167 - protein, 1824 aa, Artificial Sequence
  Synthetic Polypeptide
MSSETGPVAVDPTLRRRIEPHEFEVFFDPRELRKETCLLYEINWGGRHSIWRHTSQNTNKHVEVNFIEKFTTERYFCPNTRCSITWFLSWSPCGECSRAITEFLSRYPHVTLFIYIARLYHHADPRNRQGLRDLISSGVTIQIMTEQESGYCWRNFVNYSPSNEAHWPRYPHLWVRLYVLELYCIILGLPPCLNILRRKQPQLTFFTIALQSCHYQRLPPHILWATGLKSGGSSGGSSGSETPGTSESATPESSGGSSGGSDKKYSIGLAIGTNSVGWAVITDEYKVPSKKFKVLGNTDRHSIKKNLIGALLFDSGETAEATRLKRTARRRYTRRKNRICYLQEIFSNEMAKVDDSFFHRLEESFLVEEDKKHERHPIFGNIVDEVAYHEKYPTIYHLRKKLVDSTDKADLRLIYLALAHMIKFRGHFLIEGDLNPDNSDVDKLFIQLVQTYNQLFEENPINASGVDAKAILSARLSKSRRLENLIAQLPGEKKNGLFGNLIALSLGLTPNFKSNFDLAEDAKLQLSKDTYDDDLDNLLAQIGDQYADLFLAAKNLSDAILLSDILRVNTEITKAPLSASMIKRYDEHHQDLTLLKALVRQQLPEKYKEIFFDQSKNGYAGYIDGGASQEEFYKFIKPILEKMDGTEELLVKLNREDLLRKQRTFDNGSIPHQIHLGELHAILRRQEDFYPFLKDNREKIEKILTFRIPYYVGPLARGNSRFAWMTRKSEETITPWNFEEVVDKGASAQSFIERMTNFDKNLPNEKVLPKHSLLYEYFTVYNELTKVKYVTEGMRKPAFLSGEQKKAIVDLLFKTNRKVTVKQLKEDYFKKIECFDSVEISGVEDRFNASLGTYHDLLKIIKDKDFLDNEENEDILEDIVLTLTLFEDREMIEERLKTYAHLFDDKVMKQLKRRRYTGWGRLSRKLINGIRDKQSGKTILDFLKSDGFANRNFMQLIHDDSLTFKEDIQKAQVSGQGDSLHEHIANLAGSPAIKKGILQTVKVVDELVKVMGRHKPENIVIEMARENQTTQKGQKNSRERMKRIEEGIKELGSQILKEHPVENTQLQNEKLYLYYLQNGRDMYVDQELDINRLSDYDVDHIVPQSFLKDDSIDNKVLTRSDKNRGKSDNVPSEEVVKKMKNYWRQLLNAKLITQRKFDNLTKAERGGLSELDKAGFIKRQLVETRQITKHVAQILDSRMNTKYDENDKLIREVKVITLKSKLVSDFRKDFQFYKVREINNYHHAHDAYLNAVVGTALIKKYPKLESEFVYGDYKVYDVRKMIAKSEQEIGKATAKYFFYSNIMNFFKTEITLANGEIRKRPLIETNGETGEIVWDKGRDFATVRKVLSMPQVNIVKKTEVQTGGFSKESILPKRNSDKLIARKKDWDPKKYGGFDSPTVAYSVLVVAKVEKGKSKKLKSVKELLGITIMERSSFEKNPIDFLEAKGYKEVKKDLIIKLPKYSLFELENGRKRMLASAGELQKGNELALPSKYVNFLYLASHYEKLKGSPEDNEQKQLFVEQHKHYLDEIIEQISEFSKRVILADANLDKVLSAYNKHRDKPIREQAENIIHLFTLTNLGAPAAFKYFDTTIDRKRYTSTKEVLDATLIHQSITGLYETRIDLSQLGGDSGGSGGSGGSTNLSDIIEKETGKQLVIQESILMLPEEVEEVIGNKPESDILVHTAYDESTDENVMLLTSDAPEYKPWALVIQDSNGENKIKMLSGGSGGSGGSTNLSDIIEKETGKQLVIQESILMLPEEVEEVIGNKPESDILVHTAYDESTDENVMLLTSDAPEYKPWALVIQDSNGENKIKMLSGGSPKKKRK

SEQ ID NO: 168 - protein, 1544 aa, Artificial Sequence
  Synthetic Polypeptide
MSSETGPVAVDPTLRRRIEPHEFEVFFDPRELRKETCLLYEINWGGRHSIWRHTSQNTNKHVEVNFIEKFTTERYFCPNTRCSITWFLSWSPCGECSRAITEFLSRYPHVTLFIYIARLYHHADPRNRQGLRDLISSGVTIQIMTEQESGYCWRNFVNYSPSNEAHWPRYPHLWVRLYVLELYCIILGLPPCLNILRRKQPQLTFFTIALQSCHYQRLPPHILWATGLKSGGSSGGSSGSETPGTSESATPESSGGSSGGSGKRNYILGLAIGITSVGYGIIDYETRDVIDAGVRLFKEANVENNEGRRSKRGARRLKRRRRHRIQRVKKLLFDYNLLTDHSELSGINPYEARVKGLSQKLSEEEFSAALLHLAKRRGVHNVNEVEEDTGNELSTKEQISRNSKALEEKYVAELQLERLKKDGEVRGSINRFKTSDYVKEAKQLLKVQKAYHQLDQSFIDTYIDLLETRRTYYEGPGEGSPFGWKDIKEWYEMLMGHCTYFPEELRSVKYAYNADLYNALNDLNNLVITRDENEKLEYYEKFQIIENVFKQKKKPTLKQIAKEILVNEEDIKGYRVTSTGKPEFTNLKVYHDIKDITARKEIIENAELLDQIAKILTIYQSSEDIQEELTNLNSELTQEEIEQISNLKGYTGTHNLSLKAINLILDELWHTNDNQIAIFNRLKLVPKKVDLSQQKEIPTTLVDDFILSPVVKRSFIQSIKVINAIIKKYGLPNDIIIELAREKNSKDAQKMINEMQKRNRQTNERIEEIIRTTGKENAKYLIEKIKLHDMQEGKCLYSLEAIPLEDLLNNPFNYEVDHIIPRSVSFDNSFNNKVLVKQEENSKKGNRTPFQYLSSSDSKISYETFKKHILNLAKGKGRISKTKKEYLLEERDINRFSVQKDFINRNLVDTRYATRGLMNLLRSYFRVNNLDVKVKSINGGFTSFLRRKWKFKKERNKGYKHHAEDALIIANADFIFKEWKKLDKAKKVMENQMFEEKQAESMPEIETEQEYKEIFITPHQIKHIKDFKDYKYSHRVDKKPNRELINDTLYSTRKDDKGNTLIVNNLNGLYDKDNDKLKKLINKSPEKLLMYHHDPQTYQKLKLIMEQYGDEKNPLYKYYEETGNYLTKYSKKDNGPVIKKIKYYGNKLNAHLDITDDYPNSRNKVVKLSLKPYRFDVYLDNGVYKFVTVKNLDVIKKENYYEVNSKCYEEAKKLKKISNQAEFIASFYNNDLIKINGELYRVIGVNNDLLNRIEVNMIDITYREYLENMNDKRPPRIIKTIASKTQSIKKYSTDILGNLYEVKSKKHPQIIKKGGSPKKKRKVSSDYKDHDGDYKDHDIDYKDDDDKSGGSGGSGGSTNLSDIIEKETGKQLVIQESILMLPEEVEEVIGNKPESDILVHTAYDESTDENVMLLTSDAPEYKPWALVIQDSNGENKIKMLSGGSGGSGGSTNLSDIIEKETGKQLVIQESILMLPEEVEEVIGNKPESDILVHTAYDESTDENVMLLTSDAPEYKPWALVIQDSNGENKIKMLSGGSPKKKRKV

SEQ ID NO: 169 - DNA, 661 bp, Homo sapiens
catccttggtaccgagctcggatccagccaccatggatagcctcttgatgaatagacgcaagttcctgtatcagtttaaaaacgtgagatgggcaaaaggccgacgagagacatatctgtgctatgtcgttaagcgcagagattcagccaccagtttctctctcgacttcggctacctgcggaacaagaatggttgccatgttgagctcctgttcctgaggtatatcagcgactgggatttggacccagggcggtgctatagggtgacatggtttacctcctggtcaccttgttatgactgcgcgcggcatgttgccgattttctgagagggaaccctaacctgtctctgaggatcttcaccgcgcgactgtacttctgtgaggaccggaaagccgaacccgagggactgagacgcctccacagagcgggtgtgcagattgccataatgacctttaaggactacttctactgctggaacaccttcgtcgaaaatcacgagcggactttcaaggcttgggaaggattgcatgaaaacagcgtcaggctttccaggcagcttcgccgcattcttctcccgttgtacgaggttgatgacctcagagatgcctttagaacactgggactgtaggcggccgctcgattggtttggtgtggctctaa

SEQ ID NO: 170 - DNA, 755 bp, Homo sapiens
catccttggtaccgagctcggatccagccaccatgagctcagagactggcccagtggctgtggaccccacattgagacggcggatcgagccccatgagtttgaggtattcttcgatccgagagagctccgcaaggagacctgcctgctttacgaaattaattgggggggccggcactccatttggcgacatacatcacagaacactaacaagcacgtcgaagtcaacttcatcgagaagttcacgacagaaagatatttctgtccgaacacaaggtgcagcattacctggtttctcagctggagcccatgcgggcgaatgtagtagggccatcactgaattcctgtcaaggtatccccacgtcactctgtttatttacatcgcaaggctgtaccaccacgctgacccccgcaatcgacaaggcctgcgggatttgatctcttcaggtgtgactatccaaattatgactgagcaggagtcaggatactgctggagaaactttctgaattatagcccgagtaatgaagcccactggcctaggtatccccatctgtgggtacgactgtacgttcttgaactgtactgcatcatactgggcctgcctccttgtctcaacattctgagaaggaagcagccacagctgacattctttaccatcgctcttcagtcttgtcattaccagcgactgcccccacacattctctgggccaccgggttgaaatgagcggccgctcgattggtttggtgtggctctaa

SEQ ID NO: 171 - DNA, 574 bp, Petromyzon marinus
ctcacagatgctatgtcctgttcgaactcaagagaagaggagagaaaggcgggcctgtttctgggggtacgcggttaataaaccccagtccgggaccgagaggggggattcacgccgagatcttttcaattaggaaggttgaagagtatcttcgcgacaatcccggtcagttcacaattaactggtacagctcctggagcccttgcgctgattgcgccgagaaaatactcgaatggtacaaccaggacttgagaggcaatggccacactctcaagatttgggcttgcaagctttactacgagaagaacgcgagaaatcagattggcttgtggaacctcagggacaacggggtcgggttgaatgttatggtgtccgaacattaccagtgctgtagaaagatcttcattcagtccagtcacaatcagctgaacgagaacagatggctggagaaaacactgaaacgggcagagaaaaggcgctcagagctgagtatcatgatccaggtcaaaatcctgcatacaaccaaaagcccggctgtataagcggccgctcgattggtttggtgtggctctaa

SEQ ID NO: 172 - DNA, 1045 bp, Artificial Sequence
  Synthetic Polynucleotide
catccttggtaccgagctcggatccagccaccatggagctgaagtatcaccctgagatgcggtttttccactggtttagtaagtggcgcaaacttcatcgggatcaggagtatgaagtgacctggtatatctcttggtctccctgcacaaaatgtacacgcgavatggaaacatttctggccgaggatccaaaggtgacgctcacaaatctttgtggcccgcctgtattatttctgggacccggattatcaggaggcacttaggtcattgtgccaaaagcgcgacggaccacgggcgactatgaaaatcatgaattatgacgaattccagcattgctggagtaagtttgtgtacagccagcgggagctgttcgagccctggaacaatcttcccaagtactacatactgcttcacattatgttgggggagatccttcggcactctatggatcctcctaccctttacgtttaaactttaataatgagccttgggttcgcgggcgccatgaaacctatttgtgctacgaggtcgagcggatccataatgatacgtgggtcctgctgaatcagaggagggggtttctgtgtaaccaggctccacataaagatggatttctcgaggggcggcacgccgaactgtgtttccttgatgtgatacctttctggaagctcgaccttgatcaagattacagggtgacgtgtttcacctcctggtcaccctgcttcagttgcgcccaagagatggctaaatttagcagtaagaacaagcatgtgtccctctgtatttttacagccagaatttatgatgaccagggccggtgccaggaggggctgcggacactcgctgaggcgggcgcgaagatcagcataatgacatactccgaattcaaacactgttgggacacttttgtggaccaccagggctgcccatttcagccgtgggatgggctcgacgaacatagtcaggatctctcaggccggctgcgagccatattgcagaaccaggagaattaggcggccgctcgattggtttggtgtggctctaa

SEQ ID NO: 173 - DNA, 785 bp, Escherichia coli
ggccggggattctagaaataattttgtttaactttaagaaggagatataccatggatgtcttctgaaaccggtccggttgcggttgacccgaccctgcgtcgtcgtatcgaaccgcacgaattcgaagttttcttcgaccccgcgtgaactgcgtaaagaaacctgcctgctgtacgaaatcaactggggtggtcgtcactctatctggcgtcacacctctcagaacaccaacaaacacgttgaagttaacttcatcgaaaaattcaccaccgaacgttacttctgcccgaacacccgttgctctatcacctggttcctgtcttggtctccgtgcggtgaatgctcctcgtgcgatcaccgaattcctgtctcgttacccgcacgttaccctgttcatctacatcgcgcgtctgtaccaccacgcggacccgcgtaaccgtcagggtctgcgtgacctgatctcttctggtgttaccatccagatcatgaccgaacaggaatctggttactgctggcgtaacttcgttaactactctccgtctaacgaagcgcactggccgcgttacccgcacctgtgggttcgtctgtacgttctggaactgtactgcatcatcctgggtctgccgccgtgcctgaacatcctgcgtcgtaaacagccgcagctgacctcttcaccatcgcgctgcagtcttgccactaccagcgtctgccgccgcacatcctgtgggcgaccggtctgaaaggtggtagtggagggagcggcggttcaatggataagaaatac

SEQ ID NO: 174 - protein, 1710 aa, Artificial Sequence
  Synthetic Polypeptide
MSSETGPVAVDPTLRRRIEPHEFEVFFDPRELRKETCLLYEINWGGRHSIWRHTSQNTNKHVEVNFIEKFTTERYFCPNTRCSITWFLSWSPCGECSRAITEFLSRYPHVTLFIYIARLYHHADPRNRQGLRDLISSGVTIQIMTEQESGYCWRNFVNYSPSNEAHWPRYPHLWVRLYVLELYCIILGLPPCLNILRRKQPQLTFFTIALQSCHYQRLPPHILWATGLKSGSETPGTSESATPESDKKYSIGLAIGTNSVGWAVITDEYKVPSKKFKVLGNTDRHSIKKNLIGALLFDSGETAEATRLKRTARRRYTRRKNRICYLQEIFSNEMAKVDDSFFHRLEESFLVEEDKKHERHPIFGNIVDEVAYHEKYPTIYHLRKKLVDSTDKADLRLIYLALAHMIKFRGHFLIEGDLNPDNSDVDKLFIQLVQTYNQLFEENPINASGVDAKAILSARLSKSRRLENLIAQLPGEKKNGLFGNLIALSLGLTPNFKSNFDLAEDAKLQLSKDTYDDDLDNLLAQIGDQYADLFLAAKNLSDAILLSDILRVNTEITKAPLSASMIKRYDEHHQDLTLLKALVRQQLPEKYKEIFFDQSKNGYAGYIDGGASQEEFYKFIKPILEKMDGTEELLVKLNREDLLRKQRTFDNGSIPHQIHLGELHAILRRQEDFYPFLKDNREKIEKILTFRIPYYVGPLARGNSRFAWMTRKSEETITPWNFEEVVDKGASAQSFIERMTNFDKNLPNEKVLPKHSLLYEYFTVYNELTKVKYVTEGMRKPAFLSGEQKKAIVDLLFKTNRKVTVKQLKEDYFKKIECFDSVEISGVEDRFNASLGTYHDLLKIIKDKDFLDNEENEDILEDIVLTLTLFEDREMIEERLKTYAHLFDDKVMKQLKRRRYTGWGRLSRKLINGIRDKQSGKTILDFLKSDGFANRNFMQLIHDDSLTFKEDIQKAQVSGQGDSLHEHIANLAGSPAIKKGILQTVKVVDELVKVMGRHKPENIVIEMARENQTTQKGQKNSRERMKRIEEGIKELGSQILKEHPVENTQLQNEKLYLYYLQNGRDMYVDQELDINRLSDYDVDHIVPQSFLKDDSIDNKVLTRSDKNRGKSDNVPSEEVVKKMKNYWRQLLNAKLITQRKFDNLTKAERGGLSELDKAGFIKRQLVETRQITKHVAQILDSRMNTKYDENDKLIREVKVITLKSKLVSDFRKDFQFYKVREINNYHHAHDAYLNAVVGTALIKKYPKLESEFVYGDYKVYDVRKMIAKSEQEIGKATAKYFFYSNIMNFFKTEITLANGEIRKRPLIETNGETGEIVWDKGRDFATVRKVLSMPQVNIVKKTEVQTGGFSKESILPKRNSDKLIARKKDWDPKKYGGFDSPTVAYSVLVVAKVEKGKSKKLKSVKELLGITIMERSSFEKNPIDFLEAKGYKEVKKDLIIKLPKYSLFELENGRKRMLASAGELQKGNELALPSKYVNFLYLASHYEKLKGSPEDNEQKQLFVEQHKHYLDEIIEQISEFSKRVILADANLDKVLSAYNKHRDKPIREQAENIIHLFTLTNLGAPAAFKYFDTTIDRKRYTSTKEVLDATLIHQSITGLYETRIDLSQLGGDSGGSTNLSDIIEKETGKQLVIQESILMLPEEVEEVIGNKPESDILVHTAYDESTDENVMLLTSDAPEYKPWALVIQDSNGENKIKMLSGGSPKKKRKV

SEQ ID NO: 175 - protein, 1689 aa, Artificial Sequence; identical to SEQ ID NO: 160
  Synthetic Polypeptide

SEQ ID NO: 176 - protein, 1679 aa, Artificial Sequence; identical to SEQ ID NO: 166
  Synthetic Polypeptide

SEQ ID NO: 177 - protein, 1806 aa, Artificial Sequence
  Synthetic Polypeptide
MELKYHPEMRFFHWFSKWRKLHRDQEYEVTWYISWSPCTKCTRDMATFLAEDPKVTLTIFVARLYYFWDPDYQEALRSLCQKRDGPRATMKIMNYDEFQHCWSKFVYSQRELFEPWNNLPKYYILLHIMLGEILRHSMDPPTFTFNFNNEPWVRGRHETYLCYEVERMHNDTWVLLNQRRGFLCNQAPHKHGFLEGRHAELCFLDVIPFWKLDLDQDYRVTCFTSWSPCFSCAQEMAKFISKNKHVSLCIFTARIYDDQGRCQEGLRTLAEAGAKISIMTYSEFKHCWDTFVDHQGCPFQPWDGLDEHSQDLSGRLRAILQNQENSGSETPGTSESATPESDKKYSIGLAIGTNSVGWAVITDEYKVPSKKFKVLGNTDRHSIKKNLIGALLFDSGETAEATRLKRTARRRYTRRKNRICYLQEIFSNEMAKVDDSFFHRLEESFLVEEDKKHERHPIFGNIVDEVAYHEKYPTIYHLRKKLVDSTDKADLRLIYLALAHMIKFRGHFLIEGDLNPDNSDVDKLFIQLVQTYNQLFEENPINASGVDAKAILSARLSKSRRLENLIAQLPGEKKNGLFGNLIALSLGLTPNFKSNFDLAEDAKLQLSKDTYDDDLDNLLAQIGDQYADLFLAAKNLSDAILLSDILRVNTEITKAPLSASMIKRYDEHHQDLTLLKALVRQQLPEKYKEIFFDQSKNGYAGYIDGGASQEEFYKFIKPILEKMDGTEELLVKLNREDLLRKQRTFDNGSIPHQIHLGELHAILRRQEDFYPFLKDNREKIEKILTFRIPYYVGPLARGNSRFAWMTRKSEETITPWNFEEVVDKGASAQSFIERMTNFDKNLPNEKVLPKHSLLYEYFTVYNELTKVKYVTEGMRKPAFLSGEQKKAIVDLLFKTNRKVTVKQLKEDYFKKIECFDSVEISGVEDRFNASLGTYHDLLKIIKDKDFLDNEENEDILEDIVLTLTLFEDREMIEERLKTYAHLFDDKVMKQLKRRRYTGWGRLSRKLINGIRDKQSGKTILDFLKSDGFANRNFMQLIHDDSLTFKEDIQKAQVSGQGDSLHEHIANLAGSPAIKKGILQTVKVVDELVKVMGRHKPENIVIEMARENQTTQKGQKNSRERMKRIEEGIKELGSQILKEHPVENTQLQNEKLYLYYLQNGRDMYVDQELDINRLSDYDVDHIVPQSFLKDDSIDNKVLTRSDKNRGKSDNVPSEEVVKKMKNYWRQLLNAKLITQRKFDNLTKAERGGLSELDKAGFIKRQLVETRQITKHVAQILDSRMNTKYDENDKLIREVKVITLKSKLVSDFRKDFQFYKVREINNYHHAHDAYLNAVVGTALIKKYPKLESEFVYGDYKVYDVRKMIAKSEQEIGKATAKYFFYSNIMNFFKTEITLANGEIRKRPLIETNGETGEIVWDKGRDFATVRKVLSMPQVNIVKKTEVQTGGFSKESILPKRNSDKLIARKKDWDPKKYGGFDSPTVAYSVLVVAKVEKGKSKKLKSVKELLGITIMERSSFEKNPIDFLEAKGYKEVKKDLIIKLPKYSLFELENGRKRMLASAGELQKGNELALPSKYVNFLYLASHYEKLKGSPEDNEQKQLFVEQHKHYLDEIIEQISEFSKRVILADANLDKVLSAYNKHRDKPIREQAENIIHLFTLTNLGAPAAFKYFDTTIDRKRYTSTKEVLDATLIHQSITGLYETRIDLSQLGGDSGGSTNLSDIIEKETGKQLVIQESILMLPEEVEEVIGNKPESDILVHTAYDESTDENVMLLTSDAPEYKPWALVIQDSNGENKIKMLSGGSPKKKRKV

SEQ ID NO: 178 - protein, 1709 aa, Artificial Sequence
  Synthetic Polypeptide
MTNLSDIIEKETGKQLVIQESILMLPEEVEEVIGNKPESDILVHTAYDESTDENVMLLTSDAPEYKPWALVIQDSNGENKIKMLGGSSSETGPVAVDPTLRRRIEPHEFEVFFDPRELRKETCLLYEINWGGRHSIWRHTSQNTNKHVEVNFIEKFTTERYFCPNTRCSITWFLSWSPCGECSRAITEFLSRYPHVTLFIYIARLYHHADPRNRQGLRDLISSGVTIQIMTEQESGYCWRNFVNYSPSNEAHWPRYPHLWVRLYVLELYCIILGLPPCLNILRRKQPQLTFFTIALQSCHYQRLPPHILWATGLKSGSETPGTSESATPESDKKYSIGLAIGTNSVGWAVITDEYKVPSKKFKVLGNTDRHSIKKNLIGALLFDSGETAEATRLKRTARRRYTRRKNRICYLQEIFSNEMAKVDDSFFHRLEESFLVEEDKKHERHPIFGNIVDEVAYHEKYPTIYHLRKKLVDSTDKADLRLIYLALAHMIKFRGHFLIEGDLNPDNSDVDKLFIQLVQTYNQLFEENPINASGVDAKAILSARLSKSRRLENLIAQLPGEKKNGLFGNLIALSLGLTPNFKSNFDLAEDAKLQLSKDTYDDDLDNLLAQIGDQYADLFLAAKNLSDAILLSDILRVNTEITKAPLSASMIKRYDEHHQDLTLLKALVRQQLPEKYKEIFFDQSKNGYAGYIDGGASQEEFYKFIKPILEKMDGTEELLVKLNREDLLRKQRTFDNGSIPHQIHLGELHAILRRQEDFYPFLKDNREKIEKILTFRIPYYVGPLARGNSRFAWMTRKSEETITPWNFEEVVDKGASAQSFIERMTNFDKNLPNEKVLPKHSLLYEYFTVYNELTKVKYVTEGMRKPAFLSGEQKKAIVDLLFKTNRKVTVKQLKEDYFKKIECFDSVEISGVEDRFNASLGTYHDLLKIIKDKDFLDNEENEDILEDIVLTLTLFEDREMIEERLKTYAHLFDDKVMKQLKRRRYTGWGRLSRKLINGIRDKQSGKTILDFLKSDGFANRNFMQLIHDDSLTFKEDIQKAQVSGQGDSLHEHIANLAGSPAIKKGILQTVKVVDELVKVMGRHKPENIVIEMARENQTTQKGQKNSRERMKRIEEGIKELGSQILKEHPVENTQLQNEKLYLYYLQNGRDMYVDQELDINRLSDYDVDHIVPQSFLKDDSIDNKVLTRSDKNRGKSDNVPSEEVVKKMKNYWRQLLNAKLITQRKFDNLTKAERGGLSELDKAGFIKRQLVETRQITKHVAQILDSRMNTKYDENDKLIREVKVITLKSKLVSDFRKDFQFYKVREINNYHHAHDAYLNAVVGTALIKKYPKLESEFVYGDYKVYDVRKMIAKSEQEIGKATAKYFFYSNIMNFFKTEITLANGEIRKRPLIETNGETGEIVWDKGRDFATVRKVLSMPQVNIVKKTEVQTGGFSKESILPKRNSDKLIARKKDWDPKKYGGFDSPTVAYSVLVVAKVEKGKSKKLKSVKELLGITIMERSSFEKNPIDFLEAKGYKEVKKDLIIKLPKYSLFELENGRKRMLASAGELQKGNELALPSKYVNFLYLASHYEKLKGSPEDNEQKQLFVEQHKHYLDEIIEQISEFSKRVILADANLDKVLSAYNKHRDKPIREQAENIIHLFTLTNLGAPAAFKYFDTTIDRKRYTSTKEVLDATLIHQSITGLYETRIDLSQLGGDSGGSPKKKRKV

SEQ ID NO: 179 - protein, 1810 aa, Artificial Sequence
  Synthetic Polypeptide
MSSETGPVAVDPTLRRRIEPHEFEVFFDPRELRKETCLLYEINWGGRHSIWRHTSQNTNKHVEVNFIEKFTTERYFCPNTRCSITWFLSWSPCGECSRAITEFLSRYPHVTLFIYIARLYHHADPRNRQGLRDLISSGVTIQIMTEQESGYCWRNFVNYSPSNEAHWPRYPHLWVRLYVLELYCIILGLPPCLNILRRKQPQLTFFTIALQSCHYQRLPPHILWATGLKSGSETPGTSESATPESDKKYSIGLAIGTNSVGWAVITDEYKVPSKKFKVLGNTDRHSIKKNLIGALLFDSGETAEATRLKRTARRRYTRRKNRICYLQEIFSNEMAKVDDSFFHRLEESFLVEEDKKHERHPIFGNIVDEVAYHEKYPTIYHLRKKLVDSTDKADLRLIYLALAHMIKFRGHFLIEGDLNPDNSDVDKLFIQLVQTYNQLFEENPINASGVDAKAILSARLSKSRRLENLIAQLPGEKKNGLFGNLIALSLGLTPNFKSNFDLAEDAKLQLSKDTYDDDLDNLLAQIGDQYADLFLAAKNLSDAILLSDILRVNTEITKAPLSASMIKRYDEHHQDLTLLKALVRQQLPEKYKEIFFDQSKNGYAGYIDGGASQEEFYKFIKPILEKMDGTEELLVKLNREDLLRKQRTFDNGSIPHQIHLGELHAILRRQEDFYPFLKDNREKIEKILTFRIPYYVGPLARGNSRFAWMTRKSEETITPWNFEEVVDKGASAQSFIERMTNFDKNLPNEKVLPKHSLLYEYFTVYNELTKVKYVTEGMRKPAFLSGEQKKAIVDLLFKTNRKVTVKQLKEDYFKKIECFDSVEISGVEDRFNASLGTYHDLLKIIKDKDFLDNEENEDILEDIVLTLTLFEDREMIEERLKTYAHLFDDKVMKQLKRRRYTGWGRLSRKLINGIRDKQSGKTILDFLKSDGFANRNFMQLIHDDSLTFKEDIQKAQVSGQGDSLHEHIANLAGSPAIKKGILQTVKVVDELVKVMGRHKPENIVIEMARENQTTQKGQKNSRERMKRIEEGIKELGSQILKEHPVENTQLQNEKLYLYYLQNGRDMYVDQELDINRLSDYDVDHIVPQSFLKDDSIDNKVLTRSDKNRGKSDNVPSEEVVKKMKNYWRQLLNAKLITQRKFDNLTKAERGGLSELDKAGFIKRQLVETRQITKHVAQILDSRMNTKYDENDKLIREVKVITLKSKLVSDFRKDFQFYKVREINNYHHAHDAYLNAVVGTALIKKYPKLESEFVYGDYKVYDVRKMIAKSEQEIGKATAKYFFYSNIMNFFKTEITLANGEIRKRPLIETNGETGEIVWDKGRDFATVRKVLSMPQVNIVKKTEVQTGGFSKESILPKRNSDKLIARKKDWDPKKYGGFDSPTVAYSVLVVAKVEKGKSKKLKSVKELLGITIMERSSFEKNPIDFLEAKGYKEVKKDLIIKLPKYSLFELENGRKRMLASAGELQKGNELALPSKYVNFLYLASHYEKLKGSPEDNEQKQLFVEQHKHYLDEIIEQISEFSKRVILADANLDKVLSAYNKHRDKPIREQAENIIHLFTLTNLGAPAAFKYFDTTIDRKRYTSTKEVLDATLIHQSITGLYETRIDLSQLGGDSGGSGGSGGSASRGVNKVILVGNLGQDPEVRYMPNGGAVANITLATSESWRDKATGEMKEQTEWHRVVLFGKLAEVASEYLRKGSQVYIEGQLRTRKWTDQSGQDRYTTEVVVNVGGTMQMLGGRQGGGAPAGGNIGGGQPQGGWGQPQQPQGGNQFSGGAQSRPQQSAPAAPSNEPPMDFDDDIPFSGGSPKKKRKV

SEQ ID NO: 180 - protein, 1716 aa, Artificial Sequence
  Synthetic Polypeptide
MSSETGPVAVDPTLRRRIEPHEFEVFFDPRELRKETCLLYEINWGGRHSIWRHTSQNTNKHVEVNFIEKFTTERYFCPNTRCSITWFLSWSPCGECSRAITEFLSRYPHVTLFIYIARLYHHADPRNRQGLRDLISSGVTIQIMTEQESGYCWRNFVNYSPSNEAHWPRYPHLWVRLYVLELYCIILGLPPCLNILRRKQPQLTFFTIALQSCHYQRLPPHILWATGLKSGSETPGTSESATPESDKKYSIGLAIGTNSVGWAVITDEYKVPSKKFKVLGNTDRHSIKKNLIGALLFDSGETAEATRLKRTARRRYTRRKNRICYLQEIFSNEMAKVDDSFFHRLEESFLVEEDKKHERHPIFGNIVDEVAYHEKYPTIYHLRKKLVDSTDKADLRLIYLALAHMIKFRGHFLIEGDLNPDNSDVDKLFIQLVQTYNQLFEENPINASGVDAKAILSARLSKSRRLENLIAQLPGEKKNGLFGNLIALSLGLTPNFKSNFDLAEDAKLQLSKDTYDDDLDNLLAQIGDQYADLFLAAKNLSDAILLSDILRVNTEITKAPLSASMIKRYDEHHQDLTLLKALVRQQLPEKYKEIFFDQSKNGYAGYIDGGASQEEFYKFIKPILEKMDGTEELLVKLNREDLLRKQRTFDNGSIPHQIHLGELHAILRRQEDFYPFLKDNREKIEKILTFRIPYYVGPLARGNSRFAWMTRKSEETITPWNFEEVVDKGASAQSFIERMTNFDKNLPNEKVLPKHSLLYEYFTVYNELTKVKYVTEGMRKPAFLSGEQKKAIVDLLFKTNRKVTVKQLKEDYFKKIECFDSVEISGVEDRFNASLGTYHDLLKIIKDKDFLDNEENEDILEDIVLTLTLFEDREMIEERLKTYAHLFDDKVMKQLKRRRYTGWGRLSRKLINGIRDKQSGKTILDFLKSDGFANRNFMQLIHDDSLTFKEDIQKAQVSGQGDSLHEHIANLAGSPAIKKGILQTVKVVDELVKVMGRHKPENIVIEMARENQTTQKGQKNSRERMKRIEEGIKELGSQILKEHPVENTQLQNEKLYLYYLQNGRDMYVDQELDINRLSDYDVDHIVPQSFLKDDSIDNKVLTRSDKNRGKSDNVPSEEVVKKMKNYWRQLLNAKLITQRKFDNLTKAERGGLSELDKAGFIKRQLVETRQITKHVAQILDSRMNTKYDENDKLIREVKVITLKSKLVSDFRKDFQFYKVREINNYHHAHDAYLNAVVGTALIKKYPKLESEFVYGDYKVYDVRKMIAKSEQEIGKATAKYFFYSNIMNFFKTEITLANGEIRKRPLIETNGETGEIVWDKGRDFATVRKVLSMPQVNIVKKTEVQTGGFSKESILPKRNSDKLIARKKDWDPKKYGGFDSPTVAYSVLVVAKVEKGKSKKLKSVKELLGITIMERSSFEKNPIDFLEAKGYKEVKKDLIIKLPKYSLFELENGRKRMLASAGELQKGNELALPSKYVNFLYLASHYEKLKGSPEDNEQKQLFVEQHKHYLDEIIEQISEFSKRVILADANLDKVLSAYNKHRDKPIREQAENIIHLFTLTNLGAPAAFKYFDTTIDRKRYTSTKEVLDATLIHQSITGLYETRIDLSQLGGDSGGSGGSGGSTNLSDIIEKETGKQLVIQESILMLPEEVEEVIGNKPESDILVHTAYDESTDENVMLLTSDAPEYKPWALVIQDSNGENKIKMLSGGSPKKKRKV

SEQ ID NO: 181 - protein, 1722 aa, Artificial Sequence
  Synthetic Polypeptide
MSSETGPVAVDPTLRRRIEPHEFEVFFDPRELRKETCLLYEINWGGRHSIWRHTSQNTNKHVEVNFIEKFTTERYFCPNTRCSITWFLSWSPCGECSRAITEFLSRYPHVTLFIYIARLYHHADPRNRQGLRDLISSGVTIQIMTEQESGYCWRNFVNYSPSNEAHWPRYPHLWVRLYVLELYCIILGLPPCLNILRRKQPQLTFFTIALQSCHYQRLPPHILWATGLKSGSETPGTSESATPESDKKYSIGLAIGTNSVGWAVITDEYKVPSKKFKVLGNTDRHSIKKNLIGALLFDSGETAEATRLKRTARRRYTRRKNRICYLQEIFSNEMAKVDDSFFHRLEESFLVEEDKKHERHPIFGNIVDEVAYHEKYPTIYHLRKKLVDSTDKADLRLIYLALAHMIKFRGHFLIEGDLNPDNSDVDKLFIQLVQTYNQLFEENPINASGVDAKAILSARLSKSRRLENLIAQLPGEKKNGLFGNLIALSLGLTPNFKSNFDLAEDAKLQLSKDTYDDDLDNLLAQIGDQYADLFLAAKNLSDAILLSDILRVNTEITKAPLSASMIKRYDEHHQDLTLLKALVRQQLPEKYKEIFFDQSKNGYAGYIDGGASQEEFYKFIKPILEKMDGTEELLVKLNREDLLRKQRTFDNGSIPHQIHLGELHAILRRQEDFYPFLKDNREKIEKILTFRIPYYVGPLARGNSRFAWMTRKSEETITPWNFEEVVDKGASAQSFIERMTNFDKNLPNEKVLPKHSLLYEYFTVYNELTKVKYVTEGMRKPAFLSGEQKKAIVDLLFKTNRKVTVKQLKEDYFKKIECFDSVEISGVEDRFNASLGTYHDLLKIIKDKDFLDNEENEDILEDIVLTLTLFEDREMIEERLKTYAHLFDDKVMKQLKRRRYTGWGRLSRKLINGIRDKQSGKTILDFLKSDGFANRNFMQLIHDDSLTFKEDIQKAQVSGQGDSLHEHIANLAGSPAIKKGILQTVKVVDELVKVMGRHKPENIVIEMARENQTTQKGQKNSRERMKRIEEGIKELGSQILKEHPVENTQLQNEKLYLYYLQNGRDMYVDQELDINRLSDYDVDHIVPQSFLKDDSIDNKVLTRSDKNRGKSDNVPSEEVVKKMKNYWRQLLNAKLITQRKFDNLTKAERGGLSELDKAGFIKRQLVETRQITKHVAQILDSRMNTKYDENDKLIREVKVITLKSKLVSDFRKDFQFYKVREINNYHHAHDAYLNAVVGTALIKKYPKLESEFVYGDYKVYDVRKMIAKSEQEIGKATAKYFFYSNIMNFFKTEITLANGEIRKRPLIETNGETGEIVWDKGRDFATVRKVLSMPQVNIVKKTEVQTGGFSKESILPKRNSDKLIARKKDWDPKKYGGFDSPTVAYSVLVVAKVEKGKSKKLKSVKELLGITIMERSSFEKNPIDFLEAKGYKEVKKDLIIKLPKYSLFELENGRKRMLASAGELQKGNELALPSKYVNFLYLASHYEKLKGSPEDNEQKQLFVEQHKHYLDEIIEQISEFSKRVILADANLDKVLSAYNKHRDKPIREQAENIIHLFTLTNLGAPAAFKYFDTTIDRKRYTSTKEVLDATLIHQSITGLYETRIDLSQLGGDSGSETPGTSESATPESTNLSDIIEKETGKQLVIQESILMLPEEVEEVIGNKPESDILVHTAYDESTDENVMLLTSDAPEYKPWALVIQDSNGENKIKMLSGGSPKKKRKV

SEQ ID NO: 182 - protein, 1726 aa, Artificial Sequence
  Synthetic Polypeptide
MSSETGPVAVDPTLRRRIEPHEFEVFFDPRELRKETCLLYEINWGGRHSIWRHTSQNTNKHVEVNFIEKFTTERYFCPNTRCSITWFLSWSPCGECSRAITEFLSRYPHVTLFIYIARLYHHADPRNRQGLRDLISSGVTIQIMTEQESGYCWRNFVNYSPSNEAHWPRYPHLWVRLYVLELYCIILGLPPCLNILRRKQPQLTFFTIALQSCHYQRLPPHILWATGLKSGGSSGGSSGSETPGTSESATPESSGGSSGGSDKKYSIGLAIGTNSVGWAVITDEYKVPSKKFKVLGNTDRHSIKKNLIGALLFDSGETAEATRLKRTARRRYTRRKNRICYLQEIFSNEMAKVDDSFFHRLEESFLVEEDKKHERHPIFGNIVDEVAYHEKYPTIYHLRKKLVDSTDKADLRLIYLALAHMIKFRGHFLIEGDLNPDNSDVDKLFIQLVQTYNQLFEENPINASGVDAKAILSARLSKSRRLENLIAQLPGEKKNGLFGNLIALSLGLTPNFKSNFDLAEDAKLQLSKDTYDDDLDNLLAQIGDQYADLFLAAKNLSDAILLSDILRVNTEITKAPLSASMIKRYDEHHQDLTLLKALVRQQLPEKYKEIFFDQSKNGYAGYIDGGASQEEFYKFIKPILEKMDGTEELLVKLNREDLLRKQRTFDNGSIPHQIHLGELHAILRRQEDFYPFLKDNREKIEKILTFRIPYYVGPLARGNSRFAWMTRKSEETITPWNFEEVVDKGASAQSFIERMTNFDKNLPNEKVLPKHSLLYEYFTVYNELTKVKYVTEGMRKPAFLSGEQKKAIVDLLFKTNRKVTVKQLKEDYFKKIECFDSVEISGVEDRFNASLGTYHDLLKIIKDKDFLDNEENEDILEDIVLTLTLFEDREMIEERLKTYAHLFDDKVMKQLKRRRYTGWGRLSRKLINGIRDKQSGKTILDFLKSDGFANRNFMQLIHDDSLTFKEDIQKAQVSGQGDSLHEHIANLAGSPAIKKGILQTVKVVDELVKVMGRHKPENIVIEMARENQTTQKGQKNSRERMKRIEEGIKELGSQILKEHPVENTQLQNEKLYLYYLQNGRDMYVDQELDINRLSDYDVDHIVPQSFLKDDSIDNKVLTRSDKNRGKSDNVPSEEVVKKMKNYWRQLLNAKLITQRKFDNLTKAERGGLSELDKAGFIKRQLVETRQITKHVAQILDSRMNTKYDENDKLIREVKVITLKSKLVSDFRKDFQFYKVREINNYHHAHDAYLNAVVGTALIKKYPKLESEFVYGDYKVYDVRKMIAKSEQEIGKATAKYFFYSNIMNFFKTEITLANGEIRKRPLIETNGETGEIVWDKGRDFATVRKVLSMPQVNIVKKTEVQTGGFSKESILPKRNSDKLIARKKDWDPKKYGGFDSPTVAYSVLVVAKVEKGKSKKLKSVKELLGITIMERSSFEKNPIDFLEAKGYKEVKKDLIIKLPKYSLFELENGRKRMLASAGELQKGNELALPSKYVNFLYLASHYEKLKGSPEDNEQKQLFVEQHKHYLDEIIEQISEFSKRVILADANLDKVLSAYNKHRDKPIREQAENIIHLFTLTNLGAPAAFKYFDTTIDRKRYTSTKEVLDATLIHQSITGLYETRIDLSQLGGDSGGSTNLSDIIEKETGKQLVIQESILMLPEEVEEVIGNKPESDILVHTAYDESTDENVMLLTSDAPEYKPWALVIQDSNGENKIKMLSGGSPKKKRKV

SEQ ID NO: 183 - protein, 1797 aa, Artificial Sequence
  Synthetic Polypeptide
MSSETGPVAVDPTLRRRIEPHEFEVFFDPRELRKETCLLYEINWGGRHSIWRHTSQNTNKHVEVNFIEKFTTERYFCPNTRCSITWFLSWSPCGECSRAITEFLSRYPHVTLFIYIARLYHHADPRNRQGLRDLISSGVTIQIMTEQESGYCWRNFVNYSPSNEAHWPRYPHLWVRLYVLELYCIILGLPPCLNILRRKQPQLTFFTIALQSCHYQRLPPHILWATGLKSGSETPGTSESATPESDKKYSIGLAIGTNSVGWAVITDEYKVPSKKFKVLGNTDRHSIKKNLIGALLFDSGETAEATRLKRTARRRYTRRKNRICYLQEIFSNEMAKVDDSFFHRLEESFLVEEDKKHERHPIFGNIVDEVAYHEKYPTIYHLRKKLVDSTDKADLRLIYLALAHMIKFRGHFLIEGDLNPDNSDVDKLFIQLVQTYNQLFEENPINASGVDAKAILSARLSKSRRLENLIAQLPGEKKNGLFGNLIALSLGLTPNFKSNFDLAEDAKLQLSKDTYDDDLDNLLAQIGDQYADLFLAAKNLSDAILLSDILRVNTEITKAPLSASMIKRYDEHHQDLTLLKALVRQQLPEKYKEIFFDQSKNGYAGYIDGGASQEEFYKFIKPILEKMDGTEELLVKLNREDLLRKQRTFDNGSIPHQIHLGELHAILRRQEDFYPFLKDNREKIEKILTFRIPYYVGPLARGNSRFAWMTRKSEETITPWNFEEVVDKGASAQSFIERMTNFDKNLPNEKVLPKHSLLYEYFTVYNELTKVKYVTEGMRKPAFLSGEQKKAIVDLLFKTNRKVTVKQLKEDYFKKIECFDSVEISGVEDRFNASLGTYHDLLKIIKDKDFLDNEENEDILEDIVLTLTLFEDREMIEERLKTYAHLFDDKVMKQLKRRRYTGWGRLSRKLINGIRDKQSGKTILDFLKSDGFANRNFMQLIHDDSLTFKEDIQKAQVSGQGDSLHEHIANLAGSPAIKKGILQTVKVVDELVKVMGRHKPENIVIEMARENQTTQKGQKNSRERMKRIEEGIKELGSQILKEHPVENTQLQNEKLYLYYLQNGRDMYVDQELDINRLSDYDVDHIVPQSFLKDDSIDNKVLTRSDKNRGKSDNVPSEEVVKKMKNYWRQLLNAKLITQRKFDNLTKAERGGLSELDKAGFIKRQLVETRQITKHVAQILDSRMNTKYDENDKLIREVKVITLKSKLVSDFRKDFQFYKVREINNYHHAHDAYLNAVVGTALIKKYPKLESEFVYGDYKVYDVRKMIAKSEQEIGKATAKYFFYSNIMNFFKTEITLANGEIRKRPLIETNGETGEIVWDKGRDFATVRKVLSMPQVNIVKKTEVQTGGFSKESILPKRNSDKLIARKKDWDPKKYGGFDSPTVAYSVLVVAKVEKGKSKKLKSVKELLGITIMERSSFEKNPIDFLEAKGYKEVKKDLIIKLPKYSLFELENGRKRMLASAGELQKGNELALPSKYVNFLYLASHYEKLKGSPEDNEQKQLFVEQHKHYLDEIIEQISEFSKRVILADANLDKVLSAYNKHRDKPIREQAENIIHLFTLTNLGAPAAFKYFDTTIDRKRYTSTKEVLDATLIHQSITGLYETRIDLSQLGGDSGGSTNLSDIIEKETGKQLVIQESILMLPEEVEEVIGNKPESDILVHTAYDESTDENVMLLTSDAPEYKPWALVIQDSNGENKIKMLSGGSTNLSDIIEKETGKQLVIQESILMLPEEVEEVIGNKPESDILVHTAYDESTDENVMLLTSDAPEYKPWALVIQDSNGENKIKMLSGGSPKKKRKV

SEQ ID NO: 184 - protein, 1825 aa, Artificial Sequence
  Synthetic Polypeptide
MSSETGPVAVDPTLRRRIEPHEFEVFFDPRELRKETCLLYEINWGGRHSIWRHTSQNTNKHVEVNFIEKFTTERYFCPNTRCSITWFLSWSPCGECSRAITEFLSRYPHVTLFIYIARLYHHADPRNRQGLRDLISSGVTIQIMTEQESGYCWRNFVNYSPSNEAHWPRYPHLWVRLYVLELYCIILGLPPCLNILRRKQPQLTFFTIALQSCHYQRLPPHILWATGLKSGGSSGGSSGSETPGTSESATPESSGGSSGGSDKKYSIGLAIGTNSVGWAVITDEYKVPSKKFKVLGNTDRHSIKKNLIGALLFDSGETAEATRLKRTARRRYTRRKNRICYLQEIFSNEMAKVDDSFFHRLEESFLVEEDKKHERHPIFGNIVDEVAYHEKYPTIYHLRKKLVDSTDKADLRLIYLALAHMIKFRGHFLIEGDLNPDNSDVDKLFIQLVQTYNQLFEENPINASGVDAKAILSARLSKSRRLENLIAQLPGEKKNGLFGNLIALSLGLTPNFKSNFDLAEDAKLQLSKDTYDDDLDNLLAQIGDQYADLFLAAKNLSDAILLSDILRVNTEITKAPLSASMIKRYDEHHQDLTLLKALVRQQLPEKYKEIFFDQSKNGYAGYIDGGASQEEFYKFIKPILEKMDGTEELLVKLNREDLLRKQRTFDNGSIPHQIHLGELHAILRRQEDFYPFLKDNREKIEKILTFRIPYYVGPLARGNSRFAWMTRKSEETITPWNFEEVVDKGASAQSFIERMTNFDKNLPNEKVLPKHSLLYEYFTVYNELTKVKYVTEGMRKPAFLSGEQKKAIVDLLFKTNRKVTVKQLKEDYFKKIECFDSVEISGVEDRFNASLGTYHDLLKIIKDKDFLDNEENEDILEDIVLTLTLFEDREMIEERLKTYAHLFDDKVMKQLKRRRYTGWGRLSRKLINGIRDKQSGKTILDFLKSDGFANRNFMQLIHDDSLTFKEDIQKAQVSGQGDSLHEHIANLAGSPAIKKGILQTVKVVDELVKVMGRHKPENIVIEMARENQTTQKGQKNSRERMKRIEEGIKELGSQILKEHPVENTQLQNEKLYLYYLQNGRDMYVDQELDINRLSDYDVDHIVPQSFLKDDSIDNKVLTRSDKNRGKSDNVPSEEVVKKMKNYWRQLLNAKLITQRKFDNLTKAERGGLSELDKAGFIKRQLVETRQITKHVAQILDSRMNTKYDENDKLIREVKVITLKSKLVSDFRKDFQFYKVREINNYHHAHDAYLNAVVGTALIKKYPKLESEFVYGDYKVYDVRKMIAKSEQEIGKATAKYFFYSNIMNFFKTEITLANGEIRKRPLIETNGETGEIVWDKGRDFATVRKVLSMPQVNIVKKTEVQTGGFSKESILPKRNSDKLIARKKDWDPKKYGGFDSPTVAYSVLVVAKVEKGKSKKLKSVKELLGITIMERSSFEKNPIDFLEAKGYKEVKKDLIIKLPKYSLFELENGRKRMLASAGELQKGNELALPSKYVNFLYLASHYEKLKGSPEDNEQKQLFVEQHKHYLDEIIEQISEFSKRVILADANLDKVLSAYNKHRDKPIREQAENIIHLFTLTNLGAPAAFKYFDTTIDRKRYTSTKEVLDATLIHQSITGLYETRIDLSQLGGDSGGSGGSGGSTNLSDIIEKETGKQLVIQESILMLPEEVEEVIGNKPESDILVHTAYDESTDENVMLLTSDAPEYKPWALVIQDSNGENKIKMLSGGSGGSGGSTNLSDIIEKETGKQLVIQESILMLPEEVEEVIGNKPESDILVHTAYDESTDENVMLLTSDAPEYKPWALVIQDSNGENKIKMLSGGSPKKKRKV

SEQ ID NO: 185 - protein, 1719 aa, Artificial Sequence
  Synthetic Polypeptide
MGSSHHHHHHSSETGPVAVDPTLRRRIEPHEFEVFFDPRELRKETCLLYEINWGGRHSIWRHTSQNTNKHVEVNFIEKFTTERYFCPNTRCSITWFLSWSPCGECSRAITEFLSRYPHVTLFIYIARLYHHADPRNRQGLRDLISSGVTIQIMTEQESGYCWRNFVNYSPSNEAHWPRYPHLWVRLYVLELYCIILGLPPCLNILRRKQPQLTFFTIALQSCHYQRLPPHILWATGLKSGSETPGTSESATPESDKKYSIGLAIGTNSVGWAVITDEYKVPSKKFKVLGNTDRHSIKKNLIGALLFDSGETAEATRLKRTARRRYTRRKNRICYLQEIFSNEMAKVDDSFFHRLEESFLVEEDKKHERHPIFGNIVDEVAYHEKYPTIYHLRKKLVDSTDKADLRLIYLALAHMIKFRGHFLIEGDLNPDNSDVDKLFIQLVQTYNQLFEENPINASGVDAKAILSARLSKSRRLENLIAQLPGEKKNGLFGNLIALSLGLTPNFKSNFDLAEDAKLQLSKDTYDDDLDNLLAQIGDQYADLFLAAKNLSDAILLSDILRVNTEITKAPLSASMIKRYDEHHQDLTLLKALVRQQLPEKYKEIFFDQSKNGYAGYIDGGASQEEFYKFIKPILEKMDGTEELLVKLNREDLLRKQRTFDNGSIPHQIHLGELHAILRRQEDFYPFLKDNREKIEKILTFRIPYYVGPLARGNSRFAWMTRKSEETITPWNFEEVVDKGASAQSFIERMTNFDKNLPNEKVLPKHSLLYEYFTVYNELTKVKYVTEGMRKPAFLSGEQKKAIVDLLFKTNRKVTVKQLKEDYFKKIECFDSVEISGVEDRFNASLGTYHDLLKIIKDKDFLDNEENEDILEDIVLTLTLFEDREMIEERLKTYAHLFDDKVMKQLKRRRYTGWGRLSRKLINGIRDKQSGKTILDFLKSDGFANRNFMQLIHDDSLTFKEDIQKAQVSGQGDSLHEHIANLAGSPAIKKGILQTVKVVDELVKVMGRHKPENIVIEMARENQTTQKGQKNSRERMKRIEEGIKELGSQILKEHPVENTQLQNEKLYLYYLQNGRDMYVDQELDINRLSDYDVDHIVPQSFLKDDSIDNKVLTRSDKNRGKSDNVPSEEVVKKMKNYWRQLLNAKLITQRKFDNLTKAERGGLSELDKAGFIKRQLVETRQITKHVAQILDSRMNTKYDENDKLIREVKVITLKSKLVSDFRKDFQFYKVREINNYHHAHDAYLNAVVGTALIKKYPKLESEFVYGDYKVYDVRKMIAKSEQEIGKATAKYFFYSNIMNFFKTEITLANGEIRKRPLIETNGETGEIVWDKGRDFATVRKVLSMPQVNIVKKTEVQTGGFSKESILPKRNSDKLIARKKDWDPKKYGGFDSPTVAYSVLVVAKVEKGKSKKLKSVKELLGITIMERSSFEKNPIDFLEAKGYKEVKKDLIIKLPKYSLFELENGRKRMLASAGELQKGNELALPSKYVNFLYLASHYEKLKGSPEDNEQKQLFVEQHKHYLDEIIEQISEFSKRVILADANLDKVLSAYNKHRDKPIREQAENIIHLFTLTNLGAPAAFKYFDTTIDRKRYTSTKEVLDATLIHQSITGLYETRIDLSQLGGDSGGSTNLSDIIEKETGKQLVIQESILMLPEEVEEVIGNKPESDILVHTAYDESTDENVMLLTSDAPEYKPWALVIQDSNGENKIKMLSGGSPKKKRKV

SEQ ID NO: 186 - protein, 1719 aa, Artificial Sequence
  Synthetic Polypeptide
MGSSHHHHHHSSETGPVAVDPTLRRRIEPHEFEVFFDPRELRKETCLLYEINWGGRHSIWRHTSQNTNKHVEVNFIEKFTTERYFCPNTRCSITWFLSWSPCGECSRAITEFLSRYPHVTLFIYIARLYHHADPRNRQGLRDLISSGVTIQIMTEQESGYCWRNFVNYSPSNEAHWPRYPHLWVRLYVLELYCIILGLPPCLNILRRKQPQLTFFTIALQSCHYQRLPPHILWATGLKSGSETPGTSESATPESDKKYSIGLAIGTNSVGWAVITDEYKVPSKKFKVLGNTDRHSIKKNLIGALLFDSGETAEATRLKRTARRRYTRRKNRICYLQEIFSNEMAKVDDSFFHRLEESFLVEEDKKHERHPIFGNIVDEVAYHEKYPTIYHLRKKLVDSTDKADLRLIYLALAHMIKFRGHFLIEGDLNPDNSDVDKLFIQLVQTYNQLFEENPINASGVDAKAILSARLSKSRRLENLIAQLPGEKKNGLFGNLIALSLGLTPNFKSNFDLAEDAKLQLSKDTYDDDLDNLLAQIGDQYADLFLAAKNLSDAILLSDILRVNTEITKAPLSASMIKRYDEHHQDLTLLKALVRQQLPEKYKEIFFDQSKNGYAGYIDGGASQEEFYKFIKPILEKMDGTEELLVKLNREDLLRKQRTFDNGSIPHQIHLGELHAILRRQEDFYPFLKDNREKIEKILTFRIPYYVGPLARGNSRFAWMTRKSEETITPWNFEEVVDKGASAQSFIERMTAFDKNLPNEKVLPKHSLLYEYFTVYNELTKVKYVTEGMRKPAFLSGEQKKAIVDLLFKTNRKVTVKQLKEDYFKKIECFDSVEISGVEDRFNASLGTYHDLLKIIKDKDFLDNEENEDILEDIVLTLTLFEDREMIEERLKTYAHLFDDKVMKQLKRRRYTGWGALSRKLINGIRDKQSGKTILDFLKSDGFANRNFMALIHDDSLTFKEDIQKAQVSGQGDSLHEHIANLAGSPAIKKGILQTVKVVDELVKVMGRHKPENIVIEMARENQTTQKGQKNSRERMKRIEEGIKELGSQILKEHPVENTQLQNEKLYLYYLQNGRDMYVDQELDINRLSDYDVDHIVPQSFLKDDSIDNKVLTRSDKNRGKSDNVPSEEVVKKMKNYWRQLLNAKLITQRKFDNLTKAERGGLSELDKAGFIKRQLVETRAITKHVAQILDSRMNTKYDENDKLIREVKVITLKSKLVSDFRKDFQFYKVREINNYHHAHDAYLNAVVGTALIKKYPKLESEFVYGDYKVYDVRKMIAKSEQEIGKATAKYFFYSNIMNFFKTEITLANGEIRKRPLIETNGETGEIVWDKGRDFATVRKVLSMPQVNIVKKTEVQTGGFSKESILPKRNSDKLIARKKDWDPKKYGGFDSPTVAYSVLVVAKVEKGKSKKLKSVKELLGITIMERSSFEKNPIDFLEAKGYKEVKKDLIIKLPKYSLFELENGRKRMLASAGELQKGNELALPSKYVNFLYLASHYEKLKGSPEDNEQKQLFVEQHKHYLDEIIEQISEFSKRVILADANLDKVLSAYNKHRDKPIREQAENIIHLFTLTNLGAPAAFKYFDTTIDRKRYTSTKEVLDATLIHQSITGLYETRIDLSQLGGDSGGSTNLSDIIEKETGKQLVIQESILMLPEEVEEVIGNKPESDILVHTAYDESTDENVMLLTSDAPEYKPWALVIQDSNGENKIKMLSGGSPKKKRKV

SEQ ID NO: 187 - DNA, 22 bp, Artificial Sequence
  Synthetic Polynucleotide
ggtgtttcgtcctttccacaag

SEQ ID NO: 188 - DNA, 55 bp, Artificial Sequence
  Synthetic Polynucleotide
gcttgcagatggccatggcggttttagagctagaaatagcaagttaaaataaggc

SEQ ID NO: 189 - DNA, 55 bp, Artificial Sequence
  Synthetic Polynucleotide
tgtcacacatgtagttgtaggttttagagctagaaatagcaagttaaaataaggc

SEQ ID NO: 190 - DNA, 55 bp, Artificial Sequence
  Synthetic Polynucleotide
gaagcgcctggcagtgtaccgttttagagctagaaatagcaagttaaaataaggc

SEQ ID NO: 191 - DNA, 55 bp, Artificial Sequence
  Synthetic Polynucleotide
gagtccgagcagaagaagaagttttagagctagaaatagcaagttaaaataaggc

SEQ ID NO: 192 - DNA, 55 bp, Artificial Sequence
  Synthetic Polynucleotide
ggaatcccttctgcagcaccgttttagagctagaaatagcaagttaaaataaggc

SEQ ID NO: 193 - DNA, 55 bp, Artificial Sequence
  Synthetic Polynucleotide
gaacacaaagcatagactgcgttttagagctagaaatagcaagttaaaataaggc

SEQ ID NO: 194 - DNA, 56 bp, Artificial Sequence
  Synthetic Polynucleotide
ggcccagactgagcacgtagagttttagagctagaaatagcaagttaaaataaggc

SEQ ID NO: 195 - DNA, 55 bp, Artificial Sequence
  Synthetic Polynucleotide
ggcactgcggctggaggtgggttttagagctagaaatagcaagttaaaataaggc

SEQ ID NO: 196 - DNA, 55 bp, Artificial Sequence
  Synthetic Polynucleotide
gtcatcttagtcattacctggttttagagctagaaatagcaagttaaaataaggc

SEQ ID NO: 197 - DNA, 42 bp, Artificial Sequence
  Synthetic Polynucleotide
attattattattccgcggatttatttatttatttatttattt

SEQ ID NO: 198 - DNA, 40 bp, Artificial Sequence
  Synthetic Polynucleotide
attattattattagctatttatttatttatttatttattt

SEQ ID NO: 199 - DNA, 41 bp, Artificial Sequence
  Synthetic Polynucleotide
attattattattcccggatttatttatttatttatttattt

SEQ ID NO: 200 - DNA, 21 bp, Artificial Sequence
  Synthetic Polynucleotide
aaaaaaagcaccgactcggtg

SEQ ID NO: 201 - DNA, 60 bp, Artificial Sequence
  Synthetic Polynucleotide
taatacgactcactataggccgcggatttatttatttaagttttagagctagaaatagca

SEQ ID NO: 202 - DNA, 60 bp, Artificial Sequence
  Synthetic Polynucleotide
taatacgactcactataggtccgcggatttatttatttagttttagagctagaaatagca

SEQ ID NO: 203 - DNA, 60 bp, Artificial Sequence
  Synthetic Polynucleotide
taatacgactcactataggttccgcggatttatttattagttttagagctagaaatagca

SEQ ID NO: 204 - DNA, 60 bp, Artificial Sequence
  Synthetic Polynucleotide
taatacgactcactataggattccgcggatttatttattgttttagagctagaaatagca

SEQ ID NO: 205 - DNA, 61 bp, Artificial Sequence
  Synthetic Polynucleotide
taatacgactcactataggtattccgcggatttatttatgtttttagagctagaaatagca

SEQ ID NO: 206 - DNA, 60 bp, Artificial Sequence
  Synthetic Polynucleotide
taataacgactcactataggttattccgcggatttatttagtttagagctagaaatagca

SEQ ID NO: 207 - DNA, 60 bp, Artificial Sequence
  Synthetic Polynucleotide
taatacgactcactataggattattccgcggatttatttgttttagagctagaaatagca

SEQ ID NO: 208 - DNA, 60 bp, Artificial Sequence
  Synthetic Polynucleotide
taatacgactcactataggtattattccgcggatttattgttttagagctagaaatagca

SEQ ID NO: 209 - DNA, 60 bp, Artificial Sequence
  Synthetic Polynucleotide
taatacgactcactataggattattatccgcggatttatgttttagagctagaaatagca

SEQ ID NO: 210 - DNA, 60 bp, Artificial Sequence
  Synthetic Polynucleotide
taatacgactcactataggtattatattccgcggatttagttttagagctagaaatagca

SEQ ID NO: 211 - DNA, 60 bp, Artificial Sequence
  Synthetic Polynucleotide
taatacgactcactataggttattatattccgcggatttgttttagagctagaaatagca

SEQ ID NO: 212 - DNA, 60 bp, Artificial Sequence
  Synthetic Polynucleotide
taatacgactcactataggattattatattccgcggattgttttagagctagaaatagca

SEQ ID NO: 213 - DNA, 60 bp, Artificial Sequence
  Synthetic Polynucleotide
taatacgactcactataggtattattatattccgcggatgttttagagctagaaatagca

SEQ ID NO: 214 - DNA, 60 bp, Artificial Sequence
  Synthetic Polynucleotide
taatacgactcactataggattattattattaccgcggagttttagagctagaaatagca

SEQ ID NO: 215 - DNA, 60 bp, Artificial Sequence
  Synthetic Polynucleotide
taatacgactcactataggattattattattattaccgcgttttagagctagaaatagca

SEQ ID NO: 216 - DNA, 60 bp, Artificial Sequence
  Synthetic Polynucleotide
taatacgactcactataggatattaatttatttatttaagttttagagctagaaatagca

SEQ ID NO: 217 - DNA, 60 bp, Artificial Sequence
  Synthetic Polynucleotide
taatacgactcactataggggaggacgtgcgcggccgccgttttagagctagaaatagca

SEQ ID NO: 218 - DNA, 60 bp, Artificial Sequence
  Synthetic Polynucleotide
taatacgactcactataggctgtggcagtggcaccagaagttttagagctagaaatagca

SEQ ID NO: 219 - DNA, 60 bp, Artificial Sequence
  Synthetic Polynucleotide
taatacgactcactatagggaagcgcctggcagtgtaccgttttagagctagaaatagca

SEQ ID NO: 220 - DNA, 60 bp, Artificial Sequence
  Synthetic Polynucleotide
taatacgactcactataggcctcccggccggcggtatccgttttagagctagaaatagca

SEQ ID NO: 221 - DNA, 60 bp, Artificial Sequence
  Synthetic Polynucleotide
taatacgactcactatagggcttgcagatggccatggcggttttagagctagaaatagca

SEQ ID NO: 222 - DNA, 60 bp, Artificial Sequence
  Synthetic Polynucleotide
taatacgactcactataggacacatgcagttgtagtggagttttagagctagaaatagca

SEQ ID NO: 223 - DNA, 60 bp, Artificial Sequence
  Synthetic Polynucleotide
taatacgactcactataggtgtcacacatgtagttgtaggttttagagctagaaatagca

SEQ ID NO: 224 - DNA, 31 bp, Artificial Sequence
  Synthetic Polynucleotide
gtaggtagttaggatgaatggaaggttggta

SEQ ID NO: 225 - DNA, 80 bp, Artificial Sequence
  Synthetic Polynucleotide
gtccatggatccagaggtcatccattaaataaataaatccgcggggctataccaaccttccattcatcctaactacctac

SEQ ID NO: 226 - DNA, 80 bp, Artificial Sequence
  Synthetic Polynucleotide
gtccatggatccagaggtcatccataaataaataaatccgcggaagctataccaaccttccattcatcctaactacctac

SEQ ID NO: 227 - DNA, 80 bp, Artificial Sequence
  Synthetic Polynucleotide
gtccatggatccagaggtcatccataataaataaatccgcggaaggctataccaaccttccattcatcctaactacctac

SEQ ID NO: 228 - DNA, 81 bp, Artificial Sequence
  Synthetic Polynucleotide
gtccatggatccagaggtcatccaaataaataaatccgcggaatggctataccaaccttccattcatcctaaactacctac

SEQ ID NO: 229 - DNA, 80 bp, Artificial Sequence
  Synthetic Polynucleotide
gtccatggatccagaggtcatccaataaataaatccgcggaataggctataccaaccttccattcatcctaactacctac

SEQ ID NO: 230 - DNA, 82 bp, Artificial Sequence
  Synthetic Polynucleotide
gtccatggatccagaggtcatccaataaataaatccgcggaataaggctatatccaaccttccattcatcctaactacctac

SEQ ID NO: 231 - DNA, 79 bp, Artificial Sequence
  Synthetic Polynucleotide
gtccatggatccagaggtcatccaaaataatccgcggaataatggctataccaaccttccattcatcctaactacctac

SEQ ID NO: 232 - DNA, 80 bp, Artificial Sequence
  Synthetic Polynucleotide
gtccatggatccagaggtcatccaaataaatccgcggaataataggctataccaaccttccattcatcctaactacctac

SEQ ID NO: 233 - DNA, 80 bp, Artificial Sequence
  Synthetic Polynucleotide
gtccatggatccagaggtcatccaataaatccgcggataataatggctataccaaccttccattcatcctaactacctac

SEQ ID NO: 234 - DNA, 80 bp, Artificial Sequence
  Synthetic Polynucleotide
gtccatggatccagaggtcatccataaatccgcggaatataataggctataccaaccttccattcatcctaactacctac

SEQ ID NO: 235 - DNA, 80 bp, Artificial Sequence
  Synthetic Polynucleotide
gtccatggatccagaggtcatccaaaatccgcggaatataataaggctataccaaccttccattcatcctaactacctac

SEQ ID NO: 236 - DNA, 80 bp, Artificial Sequence
  Synthetic Polynucleotide
gtccatggatccagaggtcatccaaatccgcggaatataataatggctataccaaccttccattcatcctaactacctac

SEQ ID NO: 237 - DNA, 80 bp, Artificial Sequence
  Synthetic Polynucleotide
gtccatggatccagaggtcatccaatccgcggaatataataataggctataccaaccttccattcatcctaactacctac

SEQ ID NO: 238 - DNA, 80 bp, Artificial Sequence
  Synthetic Polynucleotide
gtccatggatccagaggtcatccatccgcggtaataataataatggctataccaaccttccattcatcctaactacctac

SEQ ID NO: 239 - DNA, 80 bp, Artificial Sequence
  Synthetic Polynucleotide
gtccatggatccagaggtcatccagcggtaataataataataatggctataccaaccttccattcatcctaactacctac

SEQ ID NO: 240 - DNA, 81 bp, Artificial Sequence
  Synthetic Polynucleotide
gtccatggatccagaggtcatccattaaataaataaattaatattactataaccaaccttccattcatcctaactacctac

SEQ ID NO: 241 - DNA, 80 bp, Artificial Sequence
  Synthetic Polynucleotide
gtaggtagttaggatgaatggaaggttggtgtagattattatcugcggatttattggatgacctctggatccatggacat

SEQ ID NO: 242 - DNA, 80 bp, Artificial Sequence
  Synthetic Polynucleotide
gcacctcgccgcggtactgcaccaggcggccgcgcacgtcctccatgtctaccaaccttccattcatcctaactacctac

SEQ ID NO: 243 - DNA, 80 bp, Artificial Sequence
  Synthetic Polynucleotide
cggcgccctcgcgggccccggcctggtacactgccaggcgcttctgcagtaccaaccttccattcatcctaactacctac

SEQ ID NO: 244 - DNA, 80 bp, Artificial Sequence
  Synthetic Polynucleotide
ctcttacctggactctggaatccattctggtgccactgccacagctccttaccaaccttccattcatcctaactacctac

SEQ ID NO: 245 - DNA, 81 bp, Artificial Sequence
  Synthetic Polynucleotide
ggagacgtgcctgttggaacatcctggataccgccggccgggaggagtactaccaaccttccattcatcctaactacctac

SEQ ID NO: 246 - DNA, 80 bp, Artificial Sequence
  Synthetic Polynucleotide
acccccgcccggcacccgcgtccgcgccatggccatctgcaagcagtcataccaaccttccattcatcctaactacctac

SEQ ID NO: 247 - DNA, 80 bp, Artificial Sequence
  Synthetic Polynucleotide
aggttggctctgactgtaccaccatccactacaactgcatgtgtaacagtaccaaggttccattcatcctaactacctac

SEQ ID NO: 248 - DNA, 80 bp, Artificial Sequence
  Synthetic Polynucleotide
tggctctgactgtaccaccatccactacaactacatgtgtgacagttcctaccaaccttccattcatcctaactacctac

SEQ ID NO: 249 - DNA, 60 bp, Artificial Sequence
  Synthetic Polynucleotide
taatacgactcactataggttatttcgtggatttatttagttttagagctagaaatagca

SEQ ID NO: 250 - DNA, 60 bp, Artificial Sequence
  Synthetic Polynucleotide
taatacgactcactataggatatttcgtggatttatttagttttagagctagaaatagca

SEQ ID NO: 251 - DNA, 60 bp, Artificial Sequence
  Synthetic Polynucleotide
taatacgactcactataggctatttcgtggatttatttagttttagagctagaaatagca

SEQ ID NO: 252 - DNA, 60 bp, Artificial Sequence
  Synthetic Polynucleotide
taatacgactcactatagggtatttcgtggatttatttagttttagagctagaaatagca

SEQ ID NO: 253 - DNA, 60 bp, Artificial Sequence
  Synthetic Polynucleotide
taatacgactcactataggtaatttcgtggatttatttagttttagagctagaaatagca

SEQ ID NO: 254 - DNA, 60 bp, Artificial Sequence
  Synthetic Polynucleotide
taatacgactcactataggtcatttcgtggatttatttagttttagagctagaaatagca

SEQ ID NO: 255 - DNA, 60 bp, Artificial Sequence
  Synthetic Polynucleotide
taatacgactcactataggtgatttcgtggatttatttagttttagagctagaaatagca

SEQ ID NO: 256 - DNA, 60 bp, Artificial Sequence
  Synthetic Polynucleotide
taatacgactcactataggttttttcgtggatttatttagttttagagctagaaatagca

SEQ ID NO: 257 - DNA, 60 bp, Artificial Sequence
  Synthetic Polynucleotide
taatacgactcactataggttctttcgtggatttatttagttttagagctagaaatagca

SEQ ID NO: 258 - DNA, 60 bp, Artificial Sequence
  Synthetic Polynucleotide
taatacgactcactataggttgtttcgtggatttatttagttttagagctagaaatagca

SEQ ID NO: 259 - DNA, 60 bp, Artificial Sequence
  Synthetic Polynucleotide
taatacgactcactataggttaattcgtggatttatttagttttagagctagaaatagca

SEQ ID NO: 260 - DNA, 60 bp, Artificial Sequence
  Synthetic Polynucleotide
taatacgactcactataggttacttcgtggatttatttagttttagagctagaaatagca

SEQ ID NO: 261 - DNA, 60 bp, Artificial Sequence
  Synthetic Polynucleotide
taatacgactcactataggttagttcgtggatttatttagttttagagctagaaatagca

SEQ ID NO: 262 - DNA, 60 bp, Artificial Sequence
  Synthetic Polynucleotide
taatacgactcactataggttatatcgtggatttatttagttttagagctagaaatagca

SEQ ID NO: 263 - DNA, 60 bp, Artificial Sequence
  Synthetic Polynucleotide
taatacgactcactataggttatctcgtggatttatttagttttagagctagaaatagca

SEQ ID NO: 264 - DNA, 60 bp, Artificial Sequence
  Synthetic Polynucleotide
taatacgactcactataggttatgtcgtggatttatttagttttagagctagaaatagca

SEQ ID NO: 265 - DNA, 61 bp, Artificial Sequence
  Synthetic Polynucleotide
taatacgactcactataggttattatcgtggatttatttagttttagagctagaaatagca

SEQ ID NO: 266 - DNA, 61 bp, Artificial Sequence
  Synthetic Polynucleotide
taatacgactcactataggttattctcgtggatttatttagttttagagctagaaatagca

SEQ ID NO: 267 - DNA, 61 bp, Artificial Sequence
  Synthetic Polynucleotide
taatacgactcactataggttattgtcgtggatttatttagttttagagctagaaatagca

SEQ ID NO: 268 - DNA, 60 bp, Artificial Sequence
  Synthetic Polynucleotide
taatacgactcactataggttatttcatggatttatttagttttagagctagaaatagca

SEQ ID NO: 269 - DNA, 60 bp, Artificial Sequence
  Synthetic Polynucleotide
taatacgactcactataggttatttcttggatttatttagttttagagctagaaatagca

SEQ ID NO: 270 - DNA, 60 bp, Artificial Sequence
  Synthetic Polynucleotide
taatacgactcactataggttatttcctggatttatttagttttagagctagaaatagca

SEQ ID NO: 271 - DNA, 60 bp, Artificial Sequence
  Synthetic Polynucleotide
taatacgactcactataggttatttcgaggatttatttagttttagagctagaaatagca

SEQ ID NO: 272 - DNA, 60 bp, Artificial Sequence
  Synthetic Polynucleotide
taatacgactcactataggttatttcgcggatttatttagttttagagctagaaatagca

SEQ ID NO: 273 - DNA, 60 bp, Artificial Sequence
  Synthetic Polynucleotide
taatacgactcactataggttatttcggggatttatttagttttagagctagaaatagca

SEQ ID NO: 274 - DNA, 60 bp, Artificial Sequence
  Synthetic Polynucleotide
taatacgactcactataggttatttcgtagatttatttagttttagagctagaaatagca

SEQ ID NO: 275 - DNA, 60 bp, Artificial Sequence
  Synthetic Polynucleotide
taatacgactcactataggttatttcgttgatttatttagttttagagctagaaatagca

SEQ ID NO: 276 - DNA, 60 bp, Artificial Sequence
  Synthetic Polynucleotide
taatacgactcactataggttatttcgtcgatttatttagttttagagctagaaatagca

SEQ ID NO: 277 - DNA, 60 bp, Artificial Sequence
  Synthetic Polynucleotide
taatacgactcactataggttatttcgtgaatttatttagttttagagctagaaatagca

SEQ ID NO: 278 - DNA, 60 bp, Artificial Sequence
  Synthetic Polynucleotide
taatacgactcactataggttatttcgtgtatttatttagttttagagctagaaatagca

SEQ ID NO: 279 - DNA, 60 bp, Artificial Sequence
  Synthetic Polynucleotide
taatacgactcactataggttatttcgtgcatttatttagttttagagctagaaatagca

SEQ ID NO: 280 - DNA, 60 bp, Artificial Sequence
  Synthetic Polynucleotide
taatacgactcactataggttatttcgtggttttatttagttttagagctagaaatagca

SEQ ID NO: 281 - DNA, 60 bp, Artificial Sequence
  Synthetic Polynucleotide
taatacgactcactataggttatttcgtggctttatttagttttagagctagaaatagca

SEQ ID NO: 282 - DNA, 60 bp, Artificial Sequence
  Synthetic Polynucleotide
taatacgactcactataggttatttcgtgggtttatttagttttagagctagaaatagca

SEQ ID NO: 283 - DNA, 60 bp, Artificial Sequence
  Synthetic Polynucleotide
taatacgactcactataggttatttcgtggaattatttagttttagagctagaaatagca

SEQ ID NO: 284 - DNA, 60 bp, Artificial Sequence
  Synthetic Polynucleotide
taatacgactcactataggttatttcgtggacttatttagttttagagctagaaatagca

SEQ ID NO: 285 - DNA, 60 bp, Artificial Sequence
  Synthetic Polynucleotide
taatacgactcactataggttatttcgtggagttatttagttttagagctagaaatagca

SEQ ID NO: 286 - DNA, 60 bp, Artificial Sequence
  Synthetic Polynucleotide
taatacgactcactataggttccccccccgatttatttagttttagagctagaaatagca

SEQ ID NO: 287 - DNA, 60 bp, Artificial Sequence
  Synthetic Polynucleotide
taatacgactcactataggcgcacccgtggatttatttagttttagagctagaaatagca

SEQ ID NO: 288 - DNA, 60 bp, Artificial Sequence
  Synthetic Polynucleotide
taatacgactcactataggctcgcacgtggatttatttagttttagagctagaaatagca

SEQ ID NO: 289 - DNA, 60 bp, Artificial Sequence
  Synthetic Polynucleotide
taatacgactcactataggccctcgcgtggatttatttagttttagagctagaaatagca

SEQ ID NO: 290 - DNA, 60 bp, Artificial Sequence
  Synthetic Polynucleotide
taatacgactcactataggcaccctcgtggatttatttagttttagagctagaaatagca

SEQ ID NO: 291 - DNA, 60 bp, Artificial Sequence
  Synthetic Polynucleotide
taatacgactcactataggtcgcacccgtggatttattagttttagagctagaaatagca

SEQ ID NO: 292 - DNA, 60 bp, Artificial Sequence
  Synthetic Polynucleotide
taatacgactcactataggcctcgcacgtggatttattagttttagagctagaaatagca

SEQ ID NO: 293 - DNA, 60 bp, Artificial Sequence
  Synthetic Polynucleotide
taatacgactcactataggaccctcgcgtggatttattagttttagagctagaaatagca

SEQ ID NO: 294 - DNA, 60 bp, Artificial Sequence
  Synthetic Polynucleotide
taatacgactcactatagggcaccctcgtggatttattagttttagagctagaaatagca

SEQ ID NO: 295 - DNA, 60 bp, Artificial Sequence
  Synthetic Polynucleotide
taatacgactcactatagggagtccgagcagaagaagaagttttagagctagaaatagca

SEQ ID NO: 296 - DNA, 60 bp, Artificial Sequence
  Synthetic Polynucleotide
taatacgactcactataggggaatcccttctgcagcaccgttttagagctagaaatagca

SEQ ID NO: 297 - DNA, 60 bp, Artificial Sequence
  Synthetic Polynucleotide
taatacgactcactatagggaacacaaagcatagactgcgttttagagctagaaatagca

SEQ ID NO: 298 - DNA, 60 bp, Artificial Sequence
  Synthetic Polynucleotide
taatacgactcactataggggcccagactgagcacgtgagttttagagctagaaatagca

SEQ ID NO: 299 - DNA, 60 bp, Artificial Sequence
  Synthetic Polynucleotide
taatacgactcactataggggcactgcggctggaggtgggttttagagctagaaatagca

SEQ ID NO: 300 - DNA, 60 bp, Artificial Sequence
  Synthetic Polynucleotide
taatacgactcactatagggtcatcttagtcattacctggttttagagctagaaatagca

SEQ ID NO: 301 - DNA, 60 bp, Artificial Sequence
  Synthetic Polynucleotide
acgtaaacggccacaagttcttatttcgtggatttatttatggcatcttcttcaaggacg

SEQ ID NO: 302 - DNA, 60 bp, Artificial Sequence
  Synthetic Polynucleotide
acgtaaacggccacaagttcatatttcgtggatttatttatggcatcttcttcaaggacg

SEQ ID NO: 303 - DNA, 60 bp, Artificial Sequence
  Synthetic Polynucleotide
acgtaaacggccacaagttcctatttcgtggatttatttatggcatcttcttcaaggacg

SEQ ID NO: 304 - DNA, 60 bp, Artificial Sequence
  Synthetic Polynucleotide
acgtaaacggccacaagttcgtatttcgtggatttatttatggcatcttcttcaaggacg

SEQ ID NO: 305 - DNA, 60 bp, Artificial Sequence
  Synthetic Polynucleotide
acgtaaacggccacaagttctaatttcgtggatttatttatggcatcttcttcaaggacg

SEQ ID NO: 306 - DNA, 60 bp, Artificial Sequence
  Synthetic Polynucleotide
acgtaaacggccacaagttctcatttcgtggatttatttatggcatcttcttcaaggacg

SEQ ID NO: 307 - DNA, 60 bp, Artificial Sequence
  Synthetic Polynucleotide
acgtaaacggccacaagttctgatttcgtggatttatttatggcatcttcttcaaggacg

SEQ ID NO: 308 - DNA, 60 bp, Artificial Sequence
  Synthetic Polynucleotide
acgtaaacggccacaagttcttttttcgtggatttatttatggcatcttcttcaaggacg

SEQ ID NO: 309 - DNA, 60 bp, Artificial Sequence
  Synthetic Polynucleotide
acgtaaacggccacaagttcttctttcgtggatttatttatggcatcttcttcaaggacg

SEQ ID NO: 310 - DNA, 60 bp, Artificial Sequence
  Synthetic Polynucleotide
acgtaaacggccacaagttcttgtttcgtggatttatttatggcatcttcttcaaggacg

SEQ ID NO: 311 - DNA, 60 bp, Artificial Sequence
  Synthetic Polynucleotide
acgtaaacggccacaagttcttaattcgtggatttatttatggcatcttcttcaaggacg

SEQ ID NO: 312 - DNA, 60 bp, Artificial Sequence
  Synthetic Polynucleotide
acgtaaacggccacaagttcttacttcgtggatttatttatggcatcttcttcaaggacg

SEQ ID NO: 313 - DNA, 60 bp, Artificial Sequence
  Synthetic Polynucleotide
acgtaaacggccacaagttcttagttcgtggatttatttatggcatcttcttcaaggacg

SEQ ID NO: 314 - DNA, 60 bp, Artificial Sequence
  Synthetic Polynucleotide
acgtaaacggccacaagttcttatatcgtggatttatttatggcatcttcttcaaggacg

SEQ ID NO: 315 - DNA, 60 bp, Artificial Sequence
  Synthetic Polynucleotide
acgtaaacggccacaagttcttatctcgtggatttatttatggcatcttcttcaaggacg

SEQ ID NO: 316 - DNA, 60 bp, Artificial Sequence
  Synthetic Polynucleotide
acgtaaacggccacaagttcttatgtcgtggatttatttatggcatcttcttcaaggacg

SEQ ID NO: 317 - DNA, 60 bp, Artificial Sequence
  Synthetic Polynucleotide
acgtaaacggccacaagttcttattacgtggatttatttatggcatcttcttcaaggacg

SEQ ID NO: 318 - DNA, 60 bp, Artificial Sequence
  Synthetic Polynucleotide
acgtaaacggccacaagttcttattccgtggatttatttatggcatcttcttcaaggacg

SEQ ID NO: 319 - DNA, 60 bp, Artificial Sequence
  Synthetic Polynucleotide
acgtaaacggccacaagttcttattgcgtggatttatttatggcatcttcttcaaggacg

SEQ ID NO: 320 - DNA, 60 bp, Artificial Sequence
  Synthetic Polynucleotide
acgtaaacggccacaagttcttatttcatggatttatttatggcatcttcttcaaggacg

SEQ ID NO: 321 - DNA, 60 bp, Artificial Sequence
  Synthetic Polynucleotide
acgtaaacggccacaagttcttatttcttggatttatttatggcatcttcttcaaggacg

SEQ ID NO: 322 - DNA, 60 bp, Artificial Sequence
  Synthetic Polynucleotide
acgtaaacggccacaagttcttatttcctggatttatttatggcatcttcttcaaggacg

SEQ ID NO: 323 - DNA, 60 bp, Artificial Sequence
  Synthetic Polynucleotide
acgtaaacggccacaagttcttatttcgaagatttatttatggcatcttcttcaaggacg

SEQ ID NO: 324 - DNA, 60 bp, Artificial Sequence
  Synthetic Polynucleotide
acgtaaacggccacaagttcttatttcgacgatttatttatggcatcttcttcaaggacg

SEQ ID NO: 325 - DNA, 60 bp, Artificial Sequence
  Synthetic Polynucleotide
acgtaaacggccacaagttcttatttcgaggatttatttatggcatcttcttcaaggacg

SEQ ID NO: 326 - DNA, 60 bp, Artificial Sequence
  Synthetic Polynucleotide
acgtaaacggccacaagttcttatttcgtagatttatttatggcatcttcttcaaggacg

SEQ ID NO: 327 - DNA, 60 bp, Artificial Sequence
  Synthetic Polynucleotide
acgtaaacggccacaagttcttatttcgttgatttatttatggcatcttcttcaaggacg

SEQ ID NO: 328 - DNA, 60 bp, Artificial Sequence
  Synthetic Polynucleotide
acgtaaacggccacaagttcttatttcgtcgatttatttatggcatcttcttcaaggacg

SEQ ID NO: 329 - DNA, 60 bp, Artificial Sequence
  Synthetic Polynucleotide
acgtaaacggccacaagttcttatttcgtgaatttatttatggcatcttcttcaaggacg

SEQ ID NO: 330 - DNA, 60 bp, Artificial Sequence
  Synthetic Polynucleotide
acgtaaacggccacaagttcttatttcgtgtatttatttatggcatcttcttcaaggacg

SEQ ID NO: 331 - DNA, 60 bp, Artificial Sequence
  Synthetic Polynucleotide
acgtaaacggccacaagttcttatttcgtgcatttatttatggcatcttcttcaaggacg

SEQ ID NO: 332 - DNA, 60 bp, Artificial Sequence
  Synthetic Polynucleotide
acgtaaacggccacaagttcttatttcgtggttttatttatggcatcttcttcaaggacg

SEQ ID NO: 333 - DNA, 60 bp, Artificial Sequence
  Synthetic Polynucleotide
acgtaaacggccacaagttcttatttcgtggctttatttatggcatcttcttcaaggacg

SEQ ID NO: 334 - DNA, 60 bp, Artificial Sequence
  Synthetic Polynucleotide
acgtaaacggccacaagttcttatttcgtgggtttatttatggcatcttcttcaaggacg

SEQ ID NO: 335 - DNA, 60 bp, Artificial Sequence
  Synthetic Polynucleotide
acgtaaacggccacaagttcttatttcgtggaattatttatggcatcttcttcaaggacg

SEQ ID NO: 336 - DNA, 60 bp, Artificial Sequence
  Synthetic Polynucleotide
acgtaaacggccacaagttcttatttcgtggacttatttatggcatcttcttcaaggacg

SEQ ID NO: 337 - DNA, 60 bp, Artificial Sequence
  Synthetic Polynucleotide
acgtaaacggccacaagttcttatttcgtggagttatttatggcatcttcttcaaggacg

SEQ ID NO: 338 - DNA, 61 bp, Artificial Sequence
  Synthetic Polynucleotide
acgtaaacggccacaaagtttcgcacccgtggatttatttatggcatcttcttcaaggacg

SEQ ID NO: 339 - DNA, 60 bp, Artificial Sequence
  Synthetic Polynucleotide
acgtaaacggccacaagttcctcgcacgtggatttatttatggcatcttcttcaaggacg

SEQ ID NO: 340 - DNA, 60 bp, Artificial Sequence
  Synthetic Polynucleotide
acgtaaacggccacaagttaccctcgcgtggatttatttatggcatcttcttcaaggacg

SEQ ID NO: 341 - DNA, 60 bp, Artificial Sequence
  Synthetic Polynucleotide
acgtaaacggccacaagttgcaccctcgtggatttatttatggcatcttcttcaaggacg

SEQ ID NO: 342 - DNA, 60 bp, Artificial Sequence
  Synthetic Polynucleotide
acgtaaacggccacaagtattcgcacccgtggatttattatggcatcttcttcaaggacg

SEQ ID NO: 343 - DNA, 60 bp, Artificial Sequence
  Synthetic Polynucleotide
acgtaaacggccacaagtatcctcgcacgtggatttattatggcatcttcttcaaggacg

SEQ ID NO: 344 - DNA, 60 bp, Artificial Sequence
  Synthetic Polynucleotide
acgtaaacggccacaagtataccctcgcgtggatttattatggcatcttcttcaaggacg

SEQ ID NO: 345 - DNA, 60 bp, Artificial Sequence
  Synthetic Polynucleotide
acgtaaacggccacaagtatgcaccctcgtggatttattatggcatcttcttcaaggacg

SEQ ID NO: 346 - DNA, 80 bp, Artificial Sequence
  Synthetic Polynucleotide
gtaggtagttaggatgaatggaaggttggtaggcctgagtccgagcagaagaagaagggctcccatcacatcaaccggtg

SEQ ID NO: 347 - DNA, 80 bp, Artificial Sequence
  Synthetic Polynucleotide
gtaggtagttaggatgaatggaaggttggtactcatggaatcccttctgcagcacctggatcgcttttccgagcttctgg

SEQ ID NO: 348 - DNA, 80 bp, Artificial Sequence
  Synthetic Polynucleotide
gtaggtagttaggatgaatggaaggttggtaaactggaacacaaagcatagactgcggggcgggccagcctgaatagctg

SEQ ID NO: 349 - DNA, 80 bp, Artificial Sequence
  Synthetic Polynucleotide
gtaggtagttaggatgaatggaaggttggtacttggggcccagactgagcacgtgatggcagaggaaaggaagccctgct

SEQ ID NO: 350 - DNA, 80 bp, Artificial Sequence
  Synthetic Polynucleotide
gtaggtagttaggatgaatggaaggttggtaccggtggcactgcggctggaggtgggggttaaagcggagactctggtgc

SEQ ID NO: 351 - DNA, 80 bp, Artificial Sequence
  Synthetic Polynucleotide
gtaggtagttaggatgaatggaaggttggtatggcagtcatcttagtcattacctgaggtgttcgttgtaactcatataa

SEQ ID NO: 352 - DNA, 81 bp, Artificial Sequence
  Synthetic Polynucleotide
gtaggtagttaggatgaatggaaggttggtatggcagtcatcttagtcattaccttgaggtgttcgttgtaactcatataa

SEQ ID NO: 353 - DNA, 53 bp, Artificial Sequence
  Synthetic Polynucleotide
  misc_feature (34)..(37): n is a, c, g, or t
acactctttccctacacgacgctcttccgatctnnnnacgtaaacggccacaa

SEQ ID NO: 354 - DNA, 47 bp, Artificial Sequence
  Synthetic Polynucleotide
tggagttcagacgtgtgctcttccgatctcgtccttgaagaagatgc

SEQ ID NO: 355 - DNA, 60 bp, Artificial Sequence
  Synthetic Polynucleotide
  misc_feature (34)..(37): n is a, c, g, or t
acactctttccctacacgacgctcttccgatctnnnngtaggtagttaggatgaatggaa

SEQ ID NO: 356 - DNA, 47 bp, Artificial Sequence
  Synthetic Polynucleotide
tggagttcagacgtgtgctcttccgatctcaccggttgatgtgatgg

SEQ ID NO: 357 - DNA, 47 bp, Artificial Sequence
  Synthetic Polynucleotide
tggagttcagacgtgtgctcttccgatctccagaagctcggaaaagc

SEQ ID NO: 358 - DNA, 46 bp, Artificial Sequence
  Synthetic Polynucleotide
tggagttcagacgtgtgctcttccgatctcagctattcaggctggc

SEQ ID NO: 359 - DNA, 45 bp, Artificial Sequence
  Synthetic Polynucleotide
tggagttcagacgtgtgctcttccgatctagcagggcttcctttc

SEQ ID NO: 360 - DNA, 44 bp, Artificial Sequence
  Synthetic Polynucleotide
tggagttcagacgtgtgctcttccgatctgcaccagagtctccg

SEQ ID NO: 361 - DNA, 52 bp, Artificial Sequence
  Synthetic Polynucleotide
tggagttcagacgtgtgctcttccgatctttatatgagttacaacgaacacc

SEQ ID NO: 362 - DNA, 57 bp, Artificial Sequence
  Synthetic Polynucleotide
  misc_feature (34)..(37): n is a, c, g, or t
acactctttccctacacgacgctcttccgatctnnnncagctcagcctgagtgttga

SEQ ID NO: 363 - DNA, 48 bp, Artificial Sequence
  Synthetic Polynucleotide
tggagttcagacgtgtgctcttccgatctctcgtgggtttgtggttgc

SEQ ID NO: 364 - DNA, 57 bp, Artificial Sequence
  Synthetic Polynucleotide
  misc_feature (34)..(37): n is a, c, g, or t
acactctttccctacacgacgctcttccgatctnnnncattgcagagaggcgtatca

SEQ ID NO: 365 - DNA, 47 bp, Artificial Sequence
  Synthetic Polynucleotide
tggagttcagacgtgtgctcttccgatctggggtcccaggtgctgac

SEQ ID NO: 366 - DNA, 57 bp, Artificial Sequence
  Synthetic Polynucleotide
  misc_feature (34)..(37): n is a, c, g, or t
acactctttccctacacgacgctcttccgatctnnnnccagccccatctgtcaaact

SEQ ID NO: 367 - DNA, 53 bp, Artificial Sequence
  Synthetic Polynucleotide
tggagttcagacgtgtgctcttccgatcttgaatggattcttggaaacaatga

SEQ ID NO: 368 - DNA, 57 bp, Artificial Sequence
  Synthetic Polynucleotide
  misc_feature (34)..(37): n is a, c, g, or t
acactctttccctacacgacgctcttccgatctnnnnatgtgggctgcctagaaagg

SEQ ID NO: 369 - DNA, 49 bp, Artificial Sequence
  Synthetic Polynucleotide
tggagttcagacgtgtgctcttccgatctcccagccaaacttgtcaacc

SEQ ID NO: 370 - DNA, 57 bp, Artificial Sequence
  Synthetic Polynucleotide
  misc_feature (34)..(37): n is a, c, g, or t
acactctttccctacacgacgctcttccgatctnnnngaacccaggtagccagagac

SEQ ID NO: 371 - DNA, 49 bp, Artificial Sequence
  Synthetic Polynucleotide
tggagttcagacgtgtgctcttccgatcttcctttcaacccgaacggag

SEQ ID NO: 372 - DNA, 60 bp, Artificial Sequence
  Synthetic Polynucleotide
  misc_feature (34)..(37): n is a, c, g, or t
acactctttccctacacgacgctcttccgatctnnnnctcttctttatttccagcaatgt

SEQ ID NO: 373 - DNA, 56 bp, Artificial Sequence
  Synthetic Polynucleotide
tggagttcagacgtgtgctcttccgatctgttttcatgttctaaaaatgtatccca

SEQ ID NO: 374 - DNA, 57 bp, Artificial Sequence
  Synthetic Polynucleotide
  misc_feature (34)..(37): n is a, c, g, or t
acactctttccctacacgacgctcttccgatctnnnntacagtactcccctgccctc

SEQ ID NO: 375 - DNA, 49 bp, Artificial Sequence
  Synthetic Polynucleotide
tggagttcagacgtgtgctcttccgatctgctgctcaccatcgctatct

SEQ ID NO: 376 - DNA, 57 bp, Artificial Sequence
  Synthetic Polynucleotide
  misc_feature (34)..(37): n is a, c, g, or t
acactctttccctacacgacgctcttccgatctnnnncctcatcttgggcctgtgtt

SEQ ID NO: 377 - DNA, 49 bp, Artificial Sequence
  Synthetic Polynucleotide
tggagttcagacgtgtgctcttccgatctaaatcggtaagaggtgggcc

SEQ ID NO: 378 - DNA, 55 bp, Artificial Sequence
  Synthetic Polynucleotide
  misc_feature (34)..(37): n is a, c, g, or t
acactctttccctacacgacgctcttccgatctnnnngcggacatggaggacgtg

SEQ ID NO: 379 - DNA, 47 bp, Artificial Sequence
  Synthetic Polynucleotide
tggagttcagacgtgtgctcttccgatctctgttccaccaggggccc

SEQ ID NO: 380 - DNA, 58 bp, Artificial Sequence
  Synthetic Polynucleotide
  misc_feature (34)..(37): n is a, c, g, or t
acactctttccctacacgacgctcttccgatctnnnntgcccaatcattgatgctttt

SEQ ID NO: 381 - DNA, 56 bp, Artificial Sequence
  Synthetic Polynucleotide
tggagttcagacgtgtgctcttccgatctagaaacatttaccatagactatcacct

SEQ ID NO: 382 - DNA, 59 bp, Artificial Sequence
  Synthetic Polynucleotide
  misc_feature (34)..(37): n is a, c, g, or t
acactctttccctacacgacgctcttccgatctnnnnagtagcctctttctcaatgtgc

SEQ ID NO: 383 - DNA, 50 bp, Artificial Sequence
  Synthetic Polynucleotide
tggagttcagacgtgtgctcttccgatctgctttcacaaggatgcagtct

SEQ ID NO: 384 - DNA, 56 bp, Artificial Sequence
  Synthetic Polynucleotide
  misc_feature (34)..(37): n is a, c, g, or t
acactctttccctacacgacgctcttccgatctnnnngagctagactccgagggga

SEQ ID NO: 385 - DNA, 49 bp, Artificial Sequence
  Synthetic Polynucleotide
tggagttcagacgtgtgctcttccgatcttcctcgtcctgctctcactt

SEQ ID NO: 386 - DNA, 58 bp, Artificial Sequence
  Synthetic Polynucleotide
  misc_feature (34)..(37): n is a, c, g, or t
acactctttccctacacgacgctcttccgatctnnnnagaggctgaagaggaagacca

SEQ ID NO: 387 - DNA, 49 bp, Artificial Sequence
  Synthetic Polynucleotide
tggagttcagacgtgtgctcttccgatctggcccagctgtgcattctat

SEQ ID NO: 388 - DNA, 56 bp, Artificial Sequence
  Synthetic Polynucleotide
  misc_feature (34)..(37): n is a, c, g, or t
acactctttccctacacgacgctcttccgatctnnnnccaagagggccaagtcctg

SEQ ID NO: 389 - DNA, 47 bp, Artificial Sequence
  Synthetic Polynucleotide
tggagttcagacgtgtgctcttccgatctcagcgaggagtgacagcc

SEQ ID NO: 390 - DNA, 57 bp, Artificial Sequence
  Synthetic Polynucleotide
  misc_feature (34)..(37): n is a, c, g, or t
acactctttccctacacgacgctcttccgatctnnnncactccacctgatctcgggg

SEQ ID NO: 391 - DNA, 47 bp, Artificial Sequence
  Synthetic Polynucleotide
tggagttcagacgtgtgctcttccgatctcgaggagggagggagcag

SEQ ID NO: 392 - DNA, 57 bp, Artificial Sequence
  Synthetic Polynucleotide
  misc_feature (34)..(37): n is a, c, g, or t
acactctttccctacacgacgctcttccgatctnnnnaccacaaatgcccaagagac

SEQ ID NO: 393 - DNA, 47 bp, Artificial Sequence
  Synthetic Polynucleotide
tggagttcagacgtgtgctcttccgatctgacacagtcaagggccgg

SEQ ID NO: 394 - DNA, 57 bp, Artificial Sequence
  Synthetic Polynucleotide
  misc_feature (34)..(37): n is a, c, g, or t
acactctttccctacacgacgctcttccgatctnnnncccacctttgaggaggcaaa

SEQ ID NO: 395 - DNA, 51 bp, Artificial Sequence
  Synthetic Polynucleotide
tggagttcagacgtgtgctcttccgatctttccatctgagaagagagtggt

SEQ ID NO: 396 - DNA, 57 bp, Artificial Sequence
  Synthetic Polynucleotide
  misc_feature (34)..(37): n is a, c, g, or t
acactctttccctacacgacgctcttccgatctnnnngtcataccttggcccttcct

SEQ ID NO: 397 - DNA, 47 bp, Artificial Sequence
  Synthetic Polynucleotide
tggagttcagacgtgtgctcttccgatcttccctaggcccacaccag

SEQ ID NO: 398 - DNA, 57 bp, Artificial Sequence
  Synthetic Polynucleotide
  misc_feature (34)..(37): n is a, c, g, or t
acactctttccctacacgacgctcttccgatctnnnnaacccactgaagaagcaggg

SEQ ID NO: 399 - DNA, 49 bp, Artificial Sequence
  Synthetic Polynucleotide
tggagttcagacgtgtgctcttccgatctggtgcttaatccggctccat

SEQ ID NO: 400 - DNA, 57 bp, Artificial Sequence
  Synthetic Polynucleotide
  misc_feature (34)..(37): n is a, c, g, or t
acactctttccctacacgacgctcttccgatctnnnntccagtgtttccatcccgaa

SEQ ID NO: 401 - DNA, 49 bp, Artificial Sequence
  Synthetic Polynucleotide
tggagttcagacgtgtgctcttccgatctcctctgacctccacaactct

SEQ ID NO: 402 - DNA, 57 bp, Artificial Sequence
  Synthetic Polynucleotide
  misc_feature (34)..(37): n is a, c, g, or t
acactctttccctacacgacgctcttccgatctnnnnctgggtacagttctgcgtgt

SEQ ID NO: 403 - DNA, 49 bp, Artificial Sequence
  Synthetic Polynucleotide
tggagttcagacgtgtgctcttccgatcttcactctgagcatcgccaag

SEQ ID NO: 404 - DNA, 60 bp, Artificial Sequence
  Synthetic Polynucleotide
  misc_feature (34)..(37): n is a, c, g, or t
acactctttccctacacgacgctcttccgatctnnnnggtttagagccagtgaactagag

SEQ ID NO: 405 - DNA, 56 bp, Artificial Sequence
  Synthetic Polynucleotide
tggagttcagacgtgtgctcttccgatctgcaagacaaaatcctctttatactttg

SEQ ID NO: 406 - DNA, 55 bp, Artificial Sequence
  Synthetic Polynucleotide
  misc_feature (34)..(37): n is a, c, g, or t
acactctttccctacacgacgctcttccgatctnnnngggaggggacggccttac

SEQ ID NO: 407 - DNA, 47 bp, Artificial Sequence
  Synthetic Polynucleotide
tggagttcagacgtgtgctcttccgatctgcctctggcgaacatggc

SEQ ID NO: 408 - DNA, 57 bp, Artificial Sequence
  Synthetic Polynucleotide
  misc_feature (34)..(37): n is a, c, g, or t
acactctttccctacacgacgctcttccgatctnnnntcctggttaagagcatgggc

SEQ ID NO: 409 - DNA, 49 bp, Artificial Sequence
  Synthetic Polynucleotide
tggagttcagacgtgtgctcttccgatctgattgagtccccacagcaca

SEQ ID NO: 410 - DNA, 57 bp, Artificial Sequence
  Synthetic Polynucleotide
  misc_feature (34)..(37): n is a, c, g, or t
acactctttccctacacgacgctcttccgatctnnnnccagtgtttcccatccccaa

SEQ ID NO: 411 - DNA, 50 bp, Artificial Sequence
  Synthetic Polynucleotide
tggagttcagacgtgtgctcttccgatcttgacctccacaactggaaaat

SEQ ID NO: 412 - DNA, 57 bp, Artificial Sequence
  Synthetic Polynucleotide
  misc_feature (34)..(37): n is a, c, g, or t
acactctttccctacacgacgctcttccgatctnnnngcttccagacccacctgaag

SEQ ID NO: 413 - DNA, 50 bp, Artificial Sequence
  Synthetic Polynucleotide
tggagttcagacgtgtgctcttccgatctaccgaggaaaattgcttgtcg

SEQ ID NO: 414 - DNA, 58 bp, Artificial Sequence
  Synthetic Polynucleotide
  misc_feature (34)..(37): n is a, c, g, or t
acactctttccctacacgacgctcttccgatctnnnngtgtggagagtgagtaagcca

SEQ ID NO: 415 - DNA, 50 bp, Artificial Sequence
  Synthetic Polynucleotide
tggagttcagacgtgtgctcttccgatctacggtaggatgatttcaggca

SEQ ID NO: 416 - DNA, 58 bp, Artificial Sequence
  Synthetic Polynucleotide
  misc_feature (34)..(37): n is a, c, g, or t
acactctttccctacacgacgctcttccgatctnnnncacaaagcagtgtagctcagg

SEQ ID NO: 417 - DNA, 54 bp, Artificial Sequence
  Synthetic Polynucleotide
tggagttcagacgtgtgctcttccgatcttttttggtactcgagtgttattcag

SEQ ID NO: 418 - DNA, 57 bp, Artificial Sequence
  Synthetic Polynucleotide
  misc_feature (34)..(37): n is a, c, g, or t
acactctttccctacacgacgctcttccgatctnnnntcccctgttgacctggagaa

SEQ ID NO: 419 - DNA, 49 bp, Artificial Sequence
  Synthetic Polynucleotide
tggagttcagacgtgtgctcttccgatctcactgtacttgccctgacca

SEQ ID NO: 420 - DNA, 57 bp, Artificial Sequence
  Synthetic Polynucleotide
  misc_feature (34)..(37): n is a, c, g, or t
acactctttccctacacgacgctcttccgatctnnnnttggtgttgacagggagcaa

SEQ ID NO: 421 - DNA, 49 bp, Artificial Sequence
  Synthetic Polynucleotide
tggagttcagacgtgtgctcttccgatctctgagatgtgggcagaaggg

SEQ ID NO: 422 - DNA, 57 bp, Artificial Sequence
  Synthetic Polynucleotide
  misc_feature (34)..(37): n is a, c, g, or t
acactctttccctacacgacgctcttccgatctnnnntgagagggaacagaagggct

SEQ ID NO: 423 - DNA, 49 bp, Artificial Sequence
  Synthetic Polynucleotide
tggagttcagacgtgtgctcttccgatgtgtccaaaggcccaagaacct

SEQ ID NO: 424 - DNA, 58 bp, Artificial Sequence
  Synthetic Polynucleotide
  misc_feature (34)..(37): n is a, c, g, or t
acactctttccctacacgacgctcttccgatctnnnntcctagcactttggaaggtcg

SEQ ID NO: 425 - DNA, 51 bp, Artificial Sequence
  Synthetic Polynucleotide
tggagttcagacgtgtgctcttccgatctgctcatcttaatctgctcagcc

SEQ ID NO: 426 - DNA, 57 bp, Artificial Sequence
  Synthetic Polynucleotide
  misc_feature (34)..(37): n is a, c, g, or t
acactctttccctacacgacgctcttccgatctnnnnaaaggagcagctcttcctgg

SEQ ID NO: 427 - DNA, 49 bp, Artificial Sequence
  Synthetic Polynucleotide
tggagttcagacgtgtgctcttccgatctgtctgcaccatctcccacaa

SEQ ID NO: 428 - DNA, 57 bp, Artificial Sequence
  Synthetic Polynucleotide
  misc_feature (34)..(37): n is a, c, g, or t
acactctttccctacacgacgctcttccgatctnnnnggcatggcttctgagactca

SEQ ID NO: 429 - DNA, 53 bp, Artificial Sequence
  Synthetic Polynucleotide
tggagttcagacgtgtgctcttccgatctgtctcccttgcactccctgtcttt

SEQ ID NO: 430 - DNA, 57 bp, Artificial Sequence
  Synthetic Polynucleotide
  misc_feature (34)..(37): n is a, c, g, or t
acactctttccctacacgacgctcttccgatctnnnntttggcaatggaggcattgg

SEQ ID NO: 431 - DNA, 49 bp, Artificial Sequence
  Synthetic Polynucleotide
tggagttcagacgtgtgctcttccgatctgaagaggctgcccatgagag

SEQ ID NO: 432 - DNA, 57 bp, Artificial Sequence
  Synthetic Polynucleotide
  misc_feature (34)..(37): n is a, c, g, or t
acactctttccctacacgacgctcttccgatctnnnnggtctgaggctcgaatcctg

SEQ ID NO: 433 - DNA, 49 bp, Artificial Sequence
  Synthetic Polynucleotide
tggagttcagacgtgtgctcttccgatctctgtggcctccatatccctg

SEQ ID NO: 434 - DNA, 57 bp, Artificial Sequence
  Synthetic Polynucleotide
  misc_feature (34)..(37): n is a, c, g, or t
acactctttccctacacgacgctcttccgatctnnnntttccaccagaactcagccc

SEQ ID NO: 435 - DNA, 49 bp, Artificial Sequence
  Synthetic Polynucleotide
tggagttcagacgtgtgctcttccgatctcctcggttcctccacaacac

SEQ ID NO: 436 - DNA, 57 bp, Artificial Sequence
  Synthetic Polynucleotide
  misc_feature (34)..(37): n is a, c, g, or t
acactctttccctacacgacgctcttccgatctnnnncacgggaaggacaggagaag

SEQ ID NO: 437 - DNA, 49 bp, Artificial Sequence
  Synthetic Polynucleotide
tggagttcagacgtgtgctcttccgatctgcaggggagggataaagcag

SEQ ID NO: 438 - DNA, 55 bp, Artificial Sequence
  Synthetic Polynucleotide
  misc_feature (34)..(37): n is a, c, g, or t
acactctttccctacacgacgctcttccgatctnnnngtcagtctcggcccctca

SEQ ID NO: 439 - DNA, 49 bp, Artificial Sequence
  Synthetic Polynucleotide
tggagttcagacgtgtgctcttccgatctgccactgtaaagctcttggg

SEQ ID NO: 440 - DNA, 58 bp, Artificial Sequence
  Synthetic Polynucleotide
  misc_feature (35)..(38): n is a, c, g, or t
acactctttccctacacgaacgctcttccgatctnnnnagggtagagggacagagctg

SEQ ID NO: 441 - DNA, 49 bp, Artificial Sequence
  Synthetic Polynucleotide
tggagttcagacgtgtgctcttccgatctggaccccacatagtcagtgc

SEQ ID NO: 442 - DNA, 58 bp, Artificial Sequence
  Synthetic Polynucleotide
  misc_feature (34)..(37): n is a, c, g, or t
acactctttccctacacgacgctcttccgatctnnnngctgtcagccctatctccatc

SEQ ID NO: 443 - DNA, 49 bp, Artificial Sequence
  Synthetic Polynucleotide
tggagttcagacgtgtgctcttccgatcttgggcaattaggacagggac

SEQ ID NO: 444 - DNA, 57 bp, Artificial Sequence
  Synthetic Polynucleotide
  misc_feature (34)..(37): n is a, c, g, or t
acactctttccctacacgacgctcttccgatctnnnngcagcggaggaggtagattg

SEQ ID NO: 445 - DNA, 49 bp, Artificial Sequence
  Synthetic Polynucleotide
tggagttcagacgtgtgctcttccgatctctcagtacctggagtcccga

SEQ ID NO: 446 - DNA, 57 bp, Artificial Sequence
  Synthetic Polynucleotide
  misc_feature (34)..(37): n is a, c, g, or t
acactctttccctacacgacgctcttccgatctnnnngacaggctcaggaaagctgt

SEQ ID NO: 447 - DNA, 49 bp, Artificial Sequence
  Synthetic Polynucleotide
tggagttcagacgtgtgctcttccgatctacacaagcctttctccaggg

SEQ ID NO: 448 - DNA, 57 bp, Artificial Sequence
  Synthetic Polynucleotide
  misc_feature (34)..(37): n is a, c, g, or t
acactctttccctacacgacgctcttccgatctnnnnaatagggggtgagactgggg

SEQ ID NO: 449 - DNA, 49 bp, Artificial Sequence
  Synthetic Polynucleotide
tggagttcagacgtgtgctcttccgatctgcctcagacgagacttgagg

SEQ ID NO: 450 - DNA, 57 bp, Artificial Sequence
  Synthetic Polynucleotide
  misc_feature (34)..(37): n is a, c, g, or t
acactctttccctacacgacgctcttccgatctnnnnggccagcaggaaaggaatct

SEQ ID NO: 451 - DNA, 49 bp, Artificial Sequence
  Synthetic Polynucleotide
tggagttcagacgtgtgctcttccgatcttgactgcacctgtagccatg

SEQ ID NO: 452 - DNA, 57 bp, Artificial Sequence
  Synthetic Polynucleotide
  misc_feature (34)..(37): n is a, c, g, or t
acactctttccctacacgacgctcttccgatctnnnntcaaggaaatcaccctgccc

SEQ ID NO: 453 - DNA, 49 bp, Artificial Sequence
  Synthetic Polynucleotide
tggagttcagacgtgtgctcttccgatctaacttccttggtgtgcagct

SEQ ID NO: 454 - DNA, 57 bp, Artificial Sequence
  Synthetic Polynucleotide
  misc_feature (34)..(37): n is a, c, g, or t
acactctttccctacacgacgctcttccgatctnnnnatgggctcagctacgtcatg

SEQ ID NO: 455 - DNA, 49 bp, Artificial Sequence
  Synthetic Polynucleotide
tggagttcagacgtgtgctcttccgatctaatcgcagtgtggtgggcaa

SEQ ID NO: 456 - DNA, 57 bp, Artificial Sequence
  Synthetic Polynucleotide
  misc_feature (34)..(37): n is a, c, g, or t
acactctttccctacacgacgctcttccgatctnnnncgcacatcccttgtctctct

SEQ ID NO: 457 - DNA, 49 bp, Artificial Sequence
  Synthetic Polynucleotide
tggagttcagacgtgtgctcttccgatctctactggagcacaccccaag

SEQ ID NO: 458 - DNA, 57 bp, Artificial Sequence
  Synthetic Polynucleotide
  misc_feature (34)..(37): n is a, c, g, or t
acactctttccctacacgacgctcttccgatctnnnntgggtcacgtagctttggtc

SEQ ID NO: 459 - DNA, 48 bp, Artificial Sequence
  Synthetic Polynucleotide
tggagttcagacgtgtgctcttccgatcttgtggccatgtgcaactaa

SEQ ID NO: 460 - DNA, 57 bp, Artificial Sequence
  Synthetic Polynucleotide
  misc_feature (34)..(37): n is a, c, g, or t
acactctttccctacacgacgctcttccgatctnnnnctactacgtgccagctcagg

SEQ ID NO: 461 - DNA, 49 bp, Artificial Sequence
  Synthetic Polynucleotide
tggagttcagacgtgtgctcttccgatctacctcccctcctcactaacc

SEQ ID NO: 462 - DNA, 57 bp, Artificial Sequence
  Synthetic Polynucleotide
  misc_feature (34)..(37): n is a, c, g, or t
acactctttccctacacgacgctcttccgatctnnnngcctcagctccatttcctgt

SEQ ID NO: 463 - DNA, 49 bp, Artificial Sequence
  Synthetic Polynucleotide
tggagttcagacgtgtgctcttccgatctaacctttatggcaccagggg

SEQ ID NO: 464 - DNA, 57 bp, Artificial Sequence
  Synthetic Polynucleotide
  misc_feature (34)..(37): n is a, c, g, or t
acactctttccctacacgacgctcttccgatctnnnngagctcagcattagcaggct

SEQ ID NO: 465 - DNA, 49 bp, Artificial Sequence
  Synthetic Polynucleotide
tggagttcagacgtgtgctcttccgatctttcctggctttccgattccc

SEQ ID NO: 466 - DNA, 57 bp, Artificial Sequence
  Synthetic Polynucleotide
  misc_feature (34)..(37): n is a, c, g, or t
acactctttccctacacgacgctcttccgatctnnnngtgcaattggaggaggagct

SEQ ID NO: 467 - DNA, 49 bp, Artificial Sequence
  Synthetic Polynucleotide
tggagttcagacgtgtgctcttccgatctcaccagctacaggcagaaca

SEQ ID NO: 468 - DNA, 57 bp, Artificial Sequence
  Synthetic Polynucleotide
  misc_feature (34)..(37): n is a, c, g, or t
acactctttccctacacgacgctcttccgatctnnnncctacccccaacacagatgg

SEQ ID NO: 469 - DNA, 49 bp, Artificial Sequence
  Synthetic Polynucleotide
tggagttcagacgtgtgctcttccgatctccacacaactcaggtcctcc

SEQ ID NO: 470 - DNA, 200 bp, Artificial Sequence
  Synthetic Polynucleotide
tcatctgtgcccctccctccctggcccaggtgaaggtgtggttccagaaccggaggacaaagtacaaacggcagaagctggaggaggaagggcctgagtttgagcagaagaagaagggctcccatcacatcaaccggtggcgcattgccacgaagcaggccaatggggaggacatcgatgtcacctccaatgactagggt

SEQ ID NO: 471 - DNA, 200 bp, Artificial Sequence
  Synthetic Polynucleotide
accctagtcattggaggtgacatcgatctcctccccattggcctgcttcgtggcaatgcgccaccggttgatgtgatgggagcccttcttcttctgctcaaactcaggcccttcctcctccagcttctgccgtttgtactttgtcctccggttctggaaccacaccttcacctgggccagggagggaggggcacagatga

SEQ ID NO: 472 - DNA, 201 bp, Artificial Sequence
  Synthetic Polynucleotide
catgcaattagtctatttctgctgcaagtaagcatgcatttgtaggcttgatgctttttttctgcttctccagccctggcctgggtcaatccttggggcttagactgagcacgtgatggcagaggaaaggaagccctgcttcctccagagggcgtcgcaggacagcttttcctagacagggggctagtatgtgcagctcct

SEQ ID NO: 473 - DNA, 200 bp, Artificial Sequence
  Synthetic Polynucleotide
aggagctgcacatactagcccctgtctaggaaaagctgtcctgcgacgccctctggaggaagcagggcttcctttcctctgccatcacgtgctcagtctaagccccaaggattgacccaggccagggctggagaagcagaaaaaaagcatcaagcctacaaatgcatgcttacttgcagcagaaatagactaattgcatc

SEQ ID NO: 474 - DNA, 200 bp, Artificial Sequence
  Synthetic Polynucleotide
ggctgacaaaggccgggctgggtggaaggaagggaggaagggcgaggcagagggtccaaagcaggatgacaggcaggggcaccgcggcgccccggtggcattgcggctggaggtgggggttaaagcggagactctggtgctgtgtgactacagtgggggccctgccctctctgagcccccgcctccaggcctgtgtgtgt

SEQ ID NO: 475 - DNA, 200 bp, Artificial Sequence
  Synthetic Polynucleotide
acacacacaggcctggaggcgggggctcagagagggcagggcccccactgtagtcacacagcaccagagtctccgctttaacccccacctccagccgcaatgccaccggggcgccgcggtgcccctgcctgtcatcctgctttggaccctctgcctcgcccttcctcccttccttccacccagcccggcctttgtcagcc

SEQ ID NO: 476 - DNA, 200 bp, Artificial Sequence
  Synthetic Polynucleotide
agcaccgaggagctgcgggtgcgcctcgcctcccacctgcgcaagctgcgtaagcggctcctccgcgatgccgatgacctgcagaagtgcctggcagtgtaccaggccggggcccgcgagggcgccgagcgcggcctcagcgccatccgcgagcgcctggggcccctggtggaacagggccgcgtgcgggccgccactgt

SEQ ID NO: 477 - DNA, 200 bp, Artificial Sequence
  Synthetic Polynucleotide
acagtggcggcccgcacgcggccctgttccaccaggggccccaggcgctcgcggatggcgctgaggccgcgctcggcgccctcgcgggccccggcctggtacactgccaggcacttctgcaggtcatcggcatcgcggaggagccgcttacgcagcttgcgcaggtgggaggcgaggcgcacccgcagctcctcggtgct

SEQ ID NO: 478 - DNA, 200 bp, Artificial Sequence
  Synthetic Polynucleotide
actcccctgccctcaacaagatgttttgccaactggccaagacctgccctgtgcagctgtgggttgattccacacccccgcccggcacccgcgtccgcgccatggccatctacaagcagtcacagcacatgacggaggttgtgaggcgctgcccccaccatgagcgctgctcagatagcgatggtgagcagctggggctg

SEQ ID NO: 479 - DNA, 200 bp, Artificial Sequence
  Synthetic Polynucleotide
cagccccagctgctcaccatcgctatctgagcagcgctcatggtgggggcagcgcctcacaacctccgtcatgtgctgtgactgcttgtagatggccatggcgcggacgcgggtgccgggcgggggtgtggaatcaacccacagctgcacagggcaggtcttggccagttggcaaaacatcttgttgagggcaggggagt

SEQ ID NO: 480 - DNA, 23 bp, Artificial Sequence
  Synthetic Polynucleotide
gagtccgagcagaagaagaaggg

SEQ ID NO: 481 - DNA, 23 bp, Artificial Sequence
  Synthetic Polynucleotide
gagtctaagcagaagaagaagag

SEQ ID NO: 482 - DNA, 23 bp, Artificial Sequence
  Synthetic Polynucleotide
gaggccgagcagaagaaagacgg

SEQ ID NO: 483 - DNA, 23 bp, Artificial Sequence
  Synthetic Polynucleotide
gagtcctagcaggagaagaagag

SEQ ID NO: 484 - DNA, 23 bp, Artificial Sequence
  Synthetic Polynucleotide
ggcccagactgagcacgtgatgg

SEQ ID NO: 485 - DNA, 23 bp, Artificial Sequence
  Synthetic Polynucleotide
cacccagactgagcacgtgctgg

SEQ ID NO: 486 - DNA, 23 bp, Artificial Sequence
  Synthetic Polynucleotide
gacacagactgggcacgtgaggg

SEQ ID NO: 487 - DNA, 23 bp, Artificial Sequence
  Synthetic Polynucleotide
agctcagactgagcaagtgaggg

SEQ ID NO: 488 - DNA, 23 bp, Artificial Sequence
  Synthetic Polynucleotide
gaccccctccaccccgcctccgg

SEQ ID NO: 489 - DNA, 23 bp, Artificial Sequence
  Synthetic Polynucleotide
ctacccctccaccccgcctccgg

SEQ ID NO: 490 - DNA, 23 bp, Artificial Sequence
  Synthetic Polynucleotide
attcccccccaccccgcctcagg

SEQ ID NO: 491 - DNA, 23 bp, Artificial Sequence
  Synthetic Polynucleotide
acacccccccaccccgcctcagg

SEQ ID NO: 492 - DNA, 23 bp, Artificial Sequence
  Synthetic Polynucleotide
tgccccccccaccccacctctgg

SEQ ID NO: 493 - DNA, 23 bp, Artificial Sequence
  Synthetic Polynucleotide
ggaatcccttctgcagcacctgg

SEQ ID NO: 494 - DNA, 23 bp, Artificial Sequence
  Synthetic Polynucleotide
ggaaccccgtctgcagcaccagg

SEQ ID NO: 495 - DNA, 23 bp, Artificial Sequence
  Synthetic Polynucleotide
ggagtccctcctacagcaccagg

SEQ ID NO: 496 - DNA, 23 bp, Artificial Sequence
  Synthetic Polynucleotide
agaggcccctctgcagcaccagg

SEQ ID NO: 497 - DNA, 23 bp, Artificial Sequence
  Synthetic Polynucleotide
gaccccctccaccccgcctccgg

SEQ ID NO: 498 - DNA, 23 bp, Artificial Sequence
  Synthetic Polynucleotide
tcccccctccaccccacctccgg

SEQ ID NO: 499 - DNA, 23 bp, Artificial Sequence
  Synthetic Polynucleotide
tgcccacctcaccccgcctctgg

SEQ ID NO: 500 - DNA, 23 bp, Artificial Sequence
  Synthetic Polynucleotide
gcccctcccaaccccacctctgg

SEQ ID NO: 501 - DNA, 23 bp, Artificial Sequence
  Synthetic Polynucleotide
cacccccctcaccccgcctcagg

SEQ ID NO: 502 - DNA, 37 bp, Artificial Sequence
  Synthetic Polynucleotide
  misc_feature (34)..(37): n is a, c, g, or t
acactctttccctacacgacgctcttccgatctnnnn

SEQ ID NO: 503 - DNA, 29 bp, Artificial Sequence
  Synthetic Polynucleotide
tggagttcagacgtgtgctcttccgatct

SEQ ID NO: 504 - DNA, 57 bp, Artificial Sequence
  Synthetic Polynucleotide
  misc_feature (30)..(37): n is a, c, g, or t
aatgatacggcgaccaccgagatctacacnnnnnnnnacactctttccctacacgac

SEQ ID NO: 505 - DNA, 59 bp, Artificial Sequence
  Synthetic Polynucleotide
  misc_feature (25)..(31): n is a, c, g, or t
caagcagaagacggcatacgagatnnnnnnngtgactggagttcagacgtgtgctcttc

SEQ ID NO: 506 - DNA, 60 bp, Artificial Sequence
  Synthetic Polynucleotide
  misc_feature (34)..(37): n is a, c, g, or t
acactctttccctacacgacgctcttccgatctnnnntcctacaagtaacagtccaagaa

SEQ ID NO: 507 - DNA, 53 bp, Artificial Sequence
  Synthetic Polynucleotide
tggagttcagacgtgtgctcttccgatctttctgcaacttaacttacgtgaaa

SEQ ID NO: 508 - DNA, 57 bp, Artificial Sequence
  Synthetic Polynucleotide
  misc_feature (34)..(37): n is a, c, g, or t
acactctttccctacacgacgctcttccgatctnnnnaccaagcccatttgtccagg

SEQ ID NO: 509 - DNA, 51 bp, Artificial Sequence
  Synthetic Polynucleotide
tggagttcagacgtgtgctcttccgatcttccttctttttgagctttgggc

SEQ ID NO: 510 - DNA, 57 bp, Artificial Sequence
  Synthetic Polynucleotide
  misc_feature (34)..(37): n is a, c, g, or t
acactctttccctacacgacgctcttccgatctnnnntccataccagcagcagttcc

SEQ ID NO: 511 - DNA, 48 bp, Artificial Sequence
  Synthetic Polynucleotide
tggagttcagacgtgtgctcttccgatctctcacctcagctcctgcac

SEQ ID NO: 512 - DNA, 59 bp, Artificial Sequence
  Synthetic Polynucleotide
  misc_feature (34)..(37): n is a, c, g, or t
acactctttccctacacgacgctcttccgatctnnnncccactgattctacaccatggt

SEQ ID NO: 513 - DNA, 51 bp, Artificial Sequence
  Synthetic Polynucleotide
tggagttcagacgtgtgctcttccgatctggagttcccaacctttttgaca

SEQ ID NO: 514 - DNA, 59 bp, Artificial Sequence
  Synthetic Polynucleotide
  misc_feature (34)..(37): n is a, c, g, or t
acactctttccctacacgacgctcttccgatctnnnnctggctggagattcagagacac

SEQ ID NO: 515 - DNA, 51 bp, Artificial Sequence
  Synthetic Polynucleotide
tggagttcagacgtgtgctcttccgatctctgccccttctgacacacatac

SEQ ID NO: 516 - DNA, 59 bp, Artificial Sequence
  Synthetic Polynucleotide
  misc_feature (34)..(37): n is a, c, g, or t
acactctttccctacacgacgctcttccgatctnnnnacccctcaaggcttgacatttc

SEQ ID NO: 517 - DNA, 51 bp, Artificial Sequence
  Synthetic Polynucleotide
tggagttcagacgtgtgctcttccgatcttgaaaagttgggagaggggatg

SEQ ID NO: 518 - DNA, 59 bp, Artificial Sequence
  Synthetic Polynucleotide
  misc_feature (34)..(37): n is a, c, g, or t
acactctttccctacacgacgctcttccgatctnnnntttgtaccccagtcccctcatc

SEQ ID NO: 519 - DNA, 52 bp, Artificial Sequence
  Synthetic Polynucleotide
tggagttcagacgtgtgctcttccgatcttgaagttacggggatgtcacttg

SEQ ID NO: 520 - DNA, 61 bp, Artificial Sequence
  Synthetic Polynucleotide
  misc_feature (34)..(37): n is a, c, g, or t
acactctttccctacacgacgctcttccgatctnnnnttaacatccagtctcccaaacaca

SEQ ID NO: 521 - DNA, 51 bp, Artificial Sequence
  Synthetic Polynucleotide
tggagttcagacgtgtgctcttccgatctacacacacacactactaggaca

SEQ ID NO: 522 - DNA, 57 bp, Artificial Sequence
  Synthetic Polynucleotide
  misc_feature (34)..(37): n is a, c, g, or t
acactctttccctacacgacgctcttccgatctnnnncgctactacggagcgagaag

SEQ ID NO: 523 - DNA, 49 bp, Artificial Sequence
  Synthetic Polynucleotide
tggagttcagacgtgtgctcttccgatctacaggggcaaagtgagtgac

SEQ ID NO: 524 - DNA, 25 bp, Artificial Sequence
  Synthetic Polynucleotide
aaaaaaagcaccgactcggtgccac

SEQ ID NO: 525 - DNA, 60 bp, Artificial Sequence; identical to SEQ ID NO: 295
  Synthetic Polynucleotide

SEQ ID NO: 526 - DNA, 60 bp, Artificial Sequence; identical to SEQ ID NO: 296
  Synthetic Polynucleotide

SEQ ID NO: 527 - DNA, 60 bp, Artificial Sequence; identical to SEQ ID NO: 298
  Synthetic Polynucleotide

SEQ ID NO: 528 - DNA, 59 bp, Artificial Sequence
  Synthetic Polynucleotide
taatacgactcactataggaccccctccaccccgcctcgttttagagctagaaatagca

SEQ ID NO: 529 - DNA, 60 bp, Artificial Sequence
  Synthetic Polynucleotide
taatacgactcactataggtctctctctctctctctctcgttttagagctagaaatagca

SEQ ID NO: 530 - DNA, 22 bp, Artificial Sequence
  Synthetic Polynucleotide
ggtgtttcgtcctttccacaag

SEQ ID NO: 531 - DNA, 55 bp, Artificial Sequence
  Synthetic Polynucleotide
gaccccctccaccccgcctcgttttagagctagaaatagcaagttaaaataaggc

SEQ ID NO: 532 - DNA, 79 bp, Artificial Sequence
  Synthetic Polynucleotide
acgtaaacggccacaagttcgcggcgatcgtctctctctctctctctctctggatcgcctggcatcttcttcaaggacg

SEQ ID NO: 533 - DNA, 79 bp, Artificial Sequence
  Synthetic Polynucleotide
cgtccttgaagaagatgccaggcgatccagagagagagagagagagagacgatcgccgcgaacttgtggccgtttacgt

SEQ ID NO: 534 - DNA, 57 bp, Artificial Sequence; identical to SEQ ID NO: 362
  Synthetic Polynucleotide
  misc_feature (34)..(37): n is a, c, g, or t

SEQ ID NO: 535 - DNA, 48 bp, Artificial Sequence; identical to SEQ ID NO: 363
  Synthetic Polynucleotide

SEQ ID NO: 536 - DNA, 57 bp, Artificial Sequence; identical to SEQ ID NO: 364
  Synthetic Polynucleotide
  misc_feature (34)..(37): n is a, c, g, or t

SEQ ID NO: 537 - DNA, 47 bp, Artificial Sequence; identical to SEQ ID NO: 365
  Synthetic Polynucleotide

SEQ ID NO: 538 - DNA, 57 bp, Artificial Sequence; identical to SEQ ID NO: 368
  Synthetic Polynucleotide
  misc_feature (34)..(37): n is a, c, g, or t

SEQ ID NO: 539 - DNA, 49 bp, Artificial Sequence; identical to SEQ ID NO: 369
  Synthetic Polynucleotide

SEQ ID NO: 540 - DNA, 59 bp, Artificial Sequence; identical to SEQ ID NO: 382
  Synthetic Polynucleotide
  misc_feature (34)..(37): n is a, c, g, or t

SEQ ID NO: 541 - DNA, 50 bp, Artificial Sequence; identical to SEQ ID NO: 383
  Synthetic Polynucleotide

SEQ ID NO: 542 - DNA, 56 bp, Artificial Sequence; identical to SEQ ID NO: 384
  Synthetic Polynucleotide
  misc_feature (34)..(37): n is a, c, g, or t

SEQ ID NO: 543 - DNA, 49 bp, Artificial Sequence; identical to SEQ ID NO: 385
  Synthetic Polynucleotide

SEQ ID NO: 544 - DNA, 58 bp, Artificial Sequence; identical to SEQ ID NO: 386
  Synthetic Polynucleotide
  misc_feature (34)..(37): n is a, c, g, or t

SEQ ID NO: 545 - DNA, 49 bp, Artificial Sequence; identical to SEQ ID NO: 387
  Synthetic Polynucleotide

SEQ ID NO: 546 - DNA, 57 bp, Artificial Sequence; identical to SEQ ID NO: 398
  Synthetic Polynucleotide
  misc_feature (34)..(37): n is a, c, g, or t

SEQ ID NO: 547 - DNA, 49 bp, Artificial Sequence; identical to SEQ ID NO: 399
  Synthetic Polynucleotide

SEQ ID NO: 548 - DNA, 57 bp, Artificial Sequence; identical to SEQ ID NO: 400
  Synthetic Polynucleotide
  misc_feature (34)..(37): n is a, c, g, or t

SEQ ID NO: 549 - DNA, 49 bp, Artificial Sequence; identical to SEQ ID NO: 401
  Synthetic Polynucleotide

SEQ ID NO: 550 - DNA, 57 bp, Artificial Sequence; identical to SEQ ID NO: 402
  Synthetic Polynucleotide
  misc_feature (34)..(37): n is a, c, g, or t

SEQ ID NO: 551 - DNA, 49 bp, Artificial Sequence; identical to SEQ ID NO: 403
  Synthetic Polynucleotide

SEQ ID NO: 552 - DNA, 57 bp, Artificial Sequence; identical to SEQ ID NO: 418
  Synthetic Polynucleotide
  misc_feature (34)..(37): n is a, c, g, or t

SEQ ID NO: 553 - DNA, 49 bp, Artificial Sequence; identical to SEQ ID NO: 419
  Synthetic Polynucleotide

SEQ ID NO: 554 - DNA, 57 bp, Artificial Sequence; identical to SEQ ID NO: 420
  Synthetic Polynucleotide
  misc_feature (34)..(37): n is a, c, g, or t

SEQ ID NO: 555 - DNA, 49 bp, Artificial Sequence; identical to SEQ ID NO: 421
  Synthetic Polynucleotide

SEQ ID NO: 556 - DNA, 57 bp, Artificial Sequence; identical to SEQ ID NO: 422
  Synthetic Polynucleotide
  misc_feature (34)..(37): n is a, c, g, or t

SEQ ID NO: 557 - DNA, 49 bp, Artificial Sequence
  Synthetic Polynucleotide
tggagttcagacgtgtgctcttccgatctgtccaaaggcccaagaacct

SEQ ID NO: 558 - DNA, 57 bp, Artificial Sequence
  Synthetic Polynucleotide
  misc_feature (34)..(37): n is a, c, g, or t
acactctttccctacacgacgctcttccgatctnnnngttcccccgagtctgcacct

SEQ ID NO: 559 - DNA, 49 bp, Artificial Sequence
  Synthetic Polynucleotide
tggagttcagacgtgtgctcttccgatctcgaacttgcattcgccgcaa

SEQ ID NO: 560 - DNA, 57 bp, Artificial Sequence
  Synthetic Polynucleotide
  misc_feature (34)..(37): n is a, c, g, or t
acactctttccctacacgacgctcttccgatctnnnnttctgccttggcatcgggtg

SEQ ID NO: 561 - DNA, 57 bp, Artificial Sequence
  Synthetic Polynucleotide
tggagttcagacgtgtgctcttccgatctcaccataccgcccctagaactaacattc

SEQ ID NO: 562 - DNA, 59 bp, Artificial Sequence
  Synthetic Polynucleotide
  misc_feature (34)..(37): n is a, c, g, or t
acactctttccctacacgacgctcttccgatctnnnnacaactgctttccatggtgtgt

SEQ ID NO: 563 - DNA, 49 bp, Artificial Sequence
  Synthetic Polynucleotide
tggagttcagacgtgtgctcttccgatcttcccagggctttcgtggaga

SEQ ID NO: 564 - DNA, 23 bp, Artificial Sequence
  Synthetic Polynucleotide
gtcaggtcgagggttctgtcagg

SEQ ID NO: 565 - DNA, 23 bp, Artificial Sequence
  Synthetic Polynucleotide
cttccaggatgagaacacagagg

SEQ ID NO: 566 - DNA, 23 bp, Artificial Sequence
  Synthetic Polynucleotide
caaccactgctcaaagatgctgg

SEQ ID NO: 567 - protein, 1368 aa, Streptococcus pyogenes [sequence omitted]

SEQ ID NO: 568 - protein, 1372 aa, Streptococcus gallolyticus
MTKKNYSIGLDIGTNSVGWAVITDDYKVPAKKMKVLGNTDKKYIKKNLLGALLFDSGETAEATRLKRTARRRYTRRKNRLRYLQEIFANEIAKVDESFFQRLDESFLTDDDKTFDSHPIFGNKAEEDAYHQKFPTIYHLRKHLADSSEKADLRLVYLALAHMIKFRGHFLIEGELNAENTDVQKIFADFVGVYNRTFDDSHLSEITVDVASILTEKISKSRRLENLIKYYPTEKKNTLFGNLIALALGLQPNFKTNFKLSEDAKLQFSKDTYEEDLEELLGKIGDDYADLFTSAKNLYDAILLSGILTVDDNSTKAPLSASMIKRYVEHHEDLEKLKEFIKANKSELYHDIFKDKNKNGYAGYIENGVKQDEFYKYLKNILSKIKIDGSDYFLDKIEREDFLRKQRTFDNGSIPHQIHLQEMHAILRRQGDYYPFLKEKQDRIEKILTFRIPYYVGPLVRKDSRFAWAEYRSDEKITPWNFDKVIDKEKSAEKFITRMTLNDLYLPEEKVLPKHSHVYETYAVYNELTKIKYVNEQGKESFFDSNMKQEIFDHVFKENRKVTKEKLLNYLNKEFPEYRIKDLIGLDKENKSFNASLGTYHDLKKILDKAFLDDKVNEEVIEDIIKTLTLFEDKDMIHERLQKYSDIFTANQLKKLERRHYTGWGRLSYKLINGIRNKENNKTILDYLIDDGSANRNFMQLINDDTLPFKQIIQKSQVVGDVDDIEAVVHDLPGSPAIKKGILQSVKIVDELVKVMGGNPDNIVIEMARENQTTNRGRSQSQQRLKKLQNSLKELGSNILNEEKPSYIEDKVENSHLQNDQLFLYYIQNGKDMYTGDELDIDHLSDYDIDHIIPQAFIKDDSIDNRVLTSSAKNRGKSDDVPSLDIVRARKAEWVRLYKSGLISKRKFDNLTKAERGGLTEADKAGFIKRQLVETRQITKHVAQILDARFNTEHDENDKVIRDVKVITLKSNLVSQFRKDFEFYKVREINDYHHAHDAYLNAVVGTALLKKYPKLASEFVYGEYKKYDIRKFITNSSDKATAKYFFYSNLMNFFKTKVKYADGTVFERPIIETNADGEIAWNKQIDFEKVRKVLSYPQVNIVKKVETQTGGFSKESILPKGDSDKLIPRKTKKVYWDTKKYGGFDSPTVAYSVFVVADVEKGKAKKLKTVKELVGISIMERSFFEENPVEFLENKGYHNIREDKLIKLPKYSLFEFEGGRRRLLASASELQKGNEMVLPGYLVELLYHAHRADNFNSTEYLNYVSEHKKEFEKVLSCVEDFANLYVDVEKNLSKIRAVADSMDNFSIEEISNSFINLLTLTALGAPADFNFLGEKIPRKRYTSTKECLNATLIHQSITGLYETRIDLSKLGEE

SEQ ID NO: 569 - protein, 1370 aa, Streptococcus gordonii
MKKGYSIGLDIGTNSVGFAVITDDYKVPSKKMKVLGNTDKRFIKKNLIGALLFDEGTTAEARRLKRTARRRYTRRKNRLRYLQEIFSEEMSKVDSSFFHRLDDSFLIPEDKRESKYPIFATLTEEKEYHKQFPTIYHLRKQLADSKEKTDLRLIYLALAHMIKYRGHFLYEEAFDIKNNDIQKIFNEFISIYDNTFEGSSLSGQNAQVEAIFTDKISKSAKRERVLKLFPDEKSTGLFSEFLKLIVGNQADFKKHFDLEDKAPLQFSKDTYDEDLENLLGQIGDDFTDLFVSAKKLYDAILLSGILTVTDPSTKAPLSASMIERYENHQNDLAALKQFIKNNLPEKYDEVFSDQSKDGYAGYIDGKTTQETFYKYIKNLLSKFEGTDYFLDKIEREDFLRKQRTFDNGSIPHQIHLQEMNAILRRQGEYYPFLKDNKEKIEKILTFRIPYYVGPLARGNRDFAWLTRNSDEAIRPWNFEEIVDKASSAEDFINKMTNYDLYLPEEKVLPKHSLLYETFAVYNELTKVKFIAEGLRDYQFLDSGQKKQIVNQLFKENRKVTEKDIIHYLHNVDGYDGIELKGIEKQFNASLSTYHDLLKIIKDKEFMDDAKNEAILENIVHTLTIFEDREMIKQRLAQYDSLFDEKVIKALTRRHYTGWGKLSAKLINGICDKQTGNTILDYLIDDGKINRNFMQLINDDGLSFKEIIQKAQVIGKTDDVKQVVQELSGSPAIKKGILQSIKIVDELVKVMGHAPESIVIEMARENQTTARGKKNSQQRYKRIEDSLKILASGLDSNILKENPTDNNQLQNDRLFLYYLQNGKDMYTGEALDINQLSSYDIDHIIPQAFIKDDSLDNRVLTSSKDNRGKSDNVPSIEVVQKRKAFWQQLLDSKLISERKFNNLTKAERGGLDERDKVGFIKRQLVETRQITKHVAQILDARYNTEVNEKDKKNRTVKIITLKSNLVSNFRKEFRLYKVREINDYHHAHDAYLNAVVAKAILKKYPKLEPEFVYGEYQKYDLKRYISRSKDPKEVEKATEKYFFYSNLLNFFKEEVHYADGTIVKRENIEYSKDTGEIAWNKEKDFAIIKKVLSLPQVNIVKKREVQTGGFSKESILPKGNSDKLIPRKTKDILLDTTKYGGFDSPVIAYSILLIADIEKGKAKKLKTVKTLVGITIMEKAAFEENPITFLENKGYHNVRKENILCLPKYSLFELENGRRRLLASAKELQKGNEIVLPVYLTTLLYHSKNVHKLDEPGHLEYIQKHRNEFKDLLNLVSEFSQKYVLADANLEKIKSLYADNEQADIEILANSFINLLTFTALGAPAAFKFFGKDIDRKRYTTVSEILNATLIHQSITGLYETWIDLSKLGED

SEQ ID NO: 570 - protein, 1056 aa, Staphylococcus aureus
GSHMKRNYILGLDIGITSVGYGIIDYETRDVIDAGVRLFKEANVENNEGRRSKRGARRLKRRRRHRIQRVKKLLFDYNLLTDHSELSGINPYEARVKGLSQKLSEEEFSAALLHLAKRRGVHNVNEVEEDTGNELSTKEQISRNSKALEEKYVAELQLERLKKDGEVRGSINRFKTSDYVKEAKQLLKVQKAYHQLDQSFIDTYIDLLETRRTYYEGPGEGSPFGWKDIKEWYEMLMGHCTYFPEELRSVKYAYNADLYNALNDLNNLVITRDENEKLEYYEKFQIIENVFKQKKKPTLKQIAKEILVNEEDIKGYRVTSTGKPEFTNLKVYHDIKDITARKEIIENAELLDQIAKILTIYQSSEDIQEELTNLNSELTQEEIEQISNLKGYTGTHNLSLKAINLILDELWHTNDNQIAIFNRLKLVPKKVDLSQQKEIPTTLVDDFILSPVVKRSFIQSIKVINAIIKKYGLPNDIIIELAREKNSKDAQKMINEMQKRNRQTNERIEEIIRTTGKENAKYLIEKIKLHDMQEGKCLYSLEAIPLEDLLNNPFNYEVDHIIPRSVSFDNSFNNKVLVKQEEASKKGNRTPFQYLSSSDSKISYETFKKHILNLAKGKGRISKTKKEYLLEERDINRFSVQKDFINRNLVDTRYATRGLMNLLRSYFRVNNLDVKVKSINGGFTSFLRRKWKFKKERNKGYKHHAEDALIIANADFIFKEWKKLDKAKKVMENQMFEEKQAESMPEIETEQEYKEIFITPHQIKHIKDFKDYKYSHRVDKKPNRELINDTLYSTRKDDKGNTLIVNNLNGLYDKDNDKLKKLINKSPEKLLMYHHDPQTYQKLKLIMEQYGDEKNPLYKYYEETGNYLTKYSKKDNGPVIKKIKYYGNKLNAHLDITDDYPNSRNKVVKLSLKPYRFDVYLDNGVYKFVTVKNLDVIKKENYYEVNSKAYEEAKKLKKISNQAEFIASFYNNDLIKINGELYRVIGVNNDLLNRIEVNMIDITYREYLENMNDKRPPRIIKTIASKTQSIKKYSTDILGNLYEVKSKKHPQIIKKG

SEQ ID NO: 571 - DNA, 22 bp, Artificial Sequence
  Synthetic Polynucleotide
aatctagtaaataaattgatgt

SEQ ID NO: 572 - DNA, 20 bp, Artificial Sequence
  Synthetic Polynucleotide
gaccaacggctaagtgaaga

SEQ ID NO: 573 - DNA, 20 bp, Artificial Sequence
  Synthetic Polynucleotide
tcctttcttcacggttgcct

SEQ ID NO: 574 - DNA, 20 bp, Artificial Sequence
  Synthetic Polynucleotide
ctcctgctcagtgatttcag

SEQ ID NO: 575 - DNA, 20 bp, Artificial Sequence
  Synthetic Polynucleotide
tgtcacacatgtagttgtag

SEQ ID NO: 576 - DNA, 20 bp, Artificial Sequence
  Synthetic Polynucleotide
cctcccggccggcggtatcc

SEQ ID NO: 577 - DNA, 23 bp, Artificial Sequence
  Synthetic Polynucleotide
ggcagccgatacccggggcaggg

SEQ ID NO: 578 - DNA, 23 bp, Artificial Sequence
  Synthetic Polynucleotide
gggcagccgatacccggggcagg

SEQ ID NO: 579 - DNA, 23 bp, Artificial Sequence
  Synthetic Polynucleotide
ttattgtccgaaataaaagaaga

SEQ ID NO: 580 - DNA, 23 bp, Artificial Sequence
  Synthetic Polynucleotide
attgtccgaaataaaagaagagg

SEQ ID NO: 581 - DNA, 23 bp, Artificial Sequence
  Synthetic Polynucleotide
ttgtccgaaataaaagaagagga

SEQ ID NO: 582 - DNA, 27 bp, Artificial Sequence
  Synthetic Polynucleotide
gtccgaaataaaagaagaggaaaaaat

SEQ ID NO: 583 - DNA, 28 bp, Artificial Sequence
  Synthetic Polynucleotide
gtccgaaataaaagaagaggaaaaaatt

SEQ ID NO: 584 - DNA, 23 bp, Artificial Sequence
  Synthetic Polynucleotide
caggaagcacgaggccactgagg

SEQ ID NO: 585 - DNA, 23 bp, Artificial Sequence
  Synthetic Polynucleotide
aacaggaagcacgaggccactga

SEQ ID NO: 586 - DNA, 23 bp, Artificial Sequence
  Synthetic Polynucleotide
aggaagcacgaggccactgagga

SEQ ID NO: 587 - DNA, 23 bp, Artificial Sequence
  Synthetic Polynucleotide
ttggattctggaatccattctgg

SEQ ID NO: 588 - DNA, 23 bp, Artificial Sequence
  Synthetic Polynucleotide
tctgcatccatcttcacttcaga

SEQ ID NO: 589 - DNA, 23 bp, Artificial Sequence
  Synthetic Polynucleotide
cttacagccagtaatgtcaccga

SEQ ID NO: 590 - protein, 177 aa, Artificial Sequence
  Synthetic Polypeptide
ASRGVNKVILVGNLGQDPEVRYMPNGGAVANITLATSESWRDKATGEMKEQTEWHRVVLFGKLAEVASEYLRKGSQVYIEGQLRTRKWTDQSGQDRYTTEVVVNVGGTMQMLGGRQGGGAPAGGNIGGGQPQGGWGQPQQPQGGNQFSGGAQSRPQQSAPAAPSNEPPMDFDDDIPF

SEQ ID NO: 591 - DNA, 20 bp, Artificial Sequence
  Synthetic Polynucleotide
ttatttcgtggatttattta

SEQ ID NO: 592 - DNA, 22 bp, Artificial Sequence
  Synthetic Polynucleotide
tgcttctccagccctggcctgg

SEQ ID NO: 593 - protein, 10 aa, Artificial Sequence
  Synthetic Polypeptide
KRRTTISIAA

SEQ ID NO: 594 - protein, 19 aa, Artificial Sequence
  Synthetic Polypeptide
ALVFYREYIGRLKQIKFKF

SEQ ID NO: 595 - protein, 14 aa, Artificial Sequence
  Synthetic Polypeptide
LPIMAKSVLDLYEL

SEQ ID NO: 596 - protein, 5 aa, Artificial Sequence
  Synthetic Polypeptide
LLRLG

SEQ ID NO: 597 - protein, 15 aa, Artificial Sequence
  Synthetic Polypeptide
TDKEINPVVKENIEW

SEQ ID NO: 598 - protein, 8 aa, Artificial Sequence
  Synthetic Polypeptide
PPSIKRKF

SEQ ID NO: 599 - protein, 9 aa, Artificial Sequence
  Synthetic Polypeptide
LPTVQFDFT

SEQ ID NO: 600 - protein, 14 aa, Artificial Sequence
  Synthetic Polypeptide
LPLDIRGTAFQQQV

SEQ ID NO: 601 - protein, 8 aa, Artificial Sequence
  Synthetic Polypeptide
AYVVLGQF

SEQ ID NO: 602 - protein, 8 aa, Artificial Sequence
  Synthetic Polypeptide
INFYGELV

SEQ ID NO: 603 - protein, 7 aa, Artificial Sequence
  Synthetic Polypeptide
KKTGDQK

SEQ ID NO: 604 - protein, 16 aa, Artificial Sequence
  Synthetic Polypeptide
SGSETPGTSESATPES

SEQ ID NO: 605 - protein, 32 aa, Artificial Sequence
  Synthetic Polypeptide
SGGSSGGSSGSETPGTSESATPESSGGSSGGS

SEQ ID NO: 606 - protein, 120 aa, Artificial Sequence
  Synthetic polypeptide
  MISC_FEATURE (5)..(120): May be absent
SGGSSGGSSGGSSGGSSGGSSGGSSGGSSGGSSGGSSGGSSGGSSGGSSGGSSGGSSGGSSGGSSGGSSGGSSGGSSGGSSGGSSGGSSGGSSGGSSGGSSGGSSGGSSGGSSGGSSGGS

SEQ ID NO: 607 - protein, 150 aa, Artificial Sequence
  Synthetic polypeptide
  MISC_FEATURE (6)..(150): May be absent
GGGGSGGGGSGGGGSGGGGSGGGGSGGGGSGGGGSGGGGSGGGGSGGGGSGGGGSGGGGSGGGGSGGGGSGGGGSGGGGSGGGGSGGGGSGGGGSGGGGSGGGGSGGGGSGGGGSGGGGSGGGGSGGGGSGGGGSGGGGSGGGGSGGGGS

SEQ ID NO: 608 - protein, 30 aa, Artificial Sequence
  Synthetic polypeptide
  MISC_FEATURE (2)..(30): May be absent
GGGGGGGGGGGGGGGGGGGGGGGGGGGGGG

SEQ ID NO: 609 - protein, 150 aa, Artificial Sequence
  Synthetic polypeptide
  MISC_FEATURE (6)..(150): May be absent
EAAAKEAAAKEAAAKEAAAKEAAAKEAAAKEAAAKEAAAKEAAAKEAAAKEAAAKEAAAKEAAAKEAAAKEAAAKEAAAKEAAAKEAAAKEAAAKEAAAKEAAAKEAAAKEAAAKEAAAKEAAAKEAAAKEAAAKEAAAKEAAAKEAAAK

SEQ ID NO: 610 - protein, 90 aa, Artificial Sequence
  Synthetic polypeptide
  MISC_FEATURE (4)..(90): May be absent
GGSGGSGGSGGSGGSGGSGGSGGSGGSGGSGGSGGSGGSGGSGGSGGSGGSGGSGGSGGSGGSGGSGGSGGSGGSGGSGGSGGSGGSGGS

SEQ ID NO: 611 - protein, 60 aa, Artificial Sequence
  Synthetic polypeptide
  misc_feature (1)..(1): Xaa can be any naturally occurring amino acid
  MISC_FEATURE (3)..(60): May be absent
XPXPXPXPXPXPXPXPXPXPXPXPXPXPXPXPXPXPXPXPXPXPXPXPXPXPXPXPXPXP

SEQ ID NO: 612 - protein, 94 aa, Artificial Sequence
  Synthetic polypeptide
  MISC_FEATURE (8)..(94): May be absent
SGGSGGSGGSGGSGGSGGSGGSGGSGGSGGSGGSGGSGGSGGSGGSGGSGGSGGSGGSGGSGGSGGSGGSGGSGGSGGSGGSGGSGGSGGSGGS

SEQ ID NO: 613 - protein, 120 aa, Artificial Sequence
  Synthetic polypeptide
  MISC_FEATURE (5)..(120): May be absent
GGGSGGGSGGGSGGGSGGGSGGGSGGGSGGGSGGGSGGGSGGGSGGGSGGGSGGGSGGGSGGGSGGGSGGGSGGGSGGGSGGGSGGGSGGGSGGGSGGGSGGGSGGGSGGGSGGGSGGGS

SEQ ID NO: 614 - protein, 7 aa, Artificial Sequence
  Synthetic Polypeptide
PKKKRKV

SEQ ID NO: 615 - protein, 30 aa, Artificial Sequence
  Synthetic Polypeptide
MDSLLMNRRKFLYQFKNVRWAKGRRETYLC

SEQ ID NO: 616 - protein, 36 aa, Artificial Sequence
  Synthetic Polypeptide
  misc_feature (2)..(2): Xaa can be any naturally occurring amino acid
  misc_feature (4)..(29): Xaa can be any naturally occurring amino acid
  misc_feature (32)..(35): Xaa can be any naturally occurring amino acid
  MISC_FEATURE (27)..(29): May be absent
  MISC_FEATURE (34)..(35): May be absent
HXEXXXXXXXXXXXXXXXXXXXXXXXXXXPCXXXXC

SEQ ID NO: 617 - protein, 11 aa, Artificial Sequence
  Synthetic Polypeptide
SPKKKRKVEAS

SEQ ID NO: 618 - RNA, 81 nt, Artificial Sequence
  Synthetic Polynucleotide
guuuuagagcuagaaauagcaaguuaaaauaaggcuaguccguuaucaacuugaaaaaguggcaccgagucggugcuuuuu

SEQ ID NO: 619 - DNA, 24 bp, Artificial Sequence
  Synthetic Polynucleotide
tcgcacccgtggatttatttatgg

SEQ ID NO: 620 - DNA, 24 bp, Artificial Sequence
  Synthetic Polynucleotide
ttcgcacccgtggatttattatgg

SEQ ID NO: 621 - DNA, 24 bp, Artificial Sequence
  Synthetic Polynucleotide
cctcgcacgtggatttatttatgg

SEQ ID NO: 622 - DNA, 24 bp, Artificial Sequence
  Synthetic Polynucleotide
tcctcgcacgtggatttattatgg

SEQ ID NO: 623 - DNA, 24 bp, Artificial Sequence
  Synthetic Polynucleotide
accctcgcgtggatttatttatgg

SEQ ID NO: 624 - DNA, 24 bp, Artificial Sequence
  Synthetic Polynucleotide
taccctcgcgtggatttattatgg

SEQ ID NO: 625 - DNA, 24 bp, Artificial Sequence
  Synthetic Polynucleotide
gcaccctcgtggatttatttatgg

SEQ ID NO: 626 - DNA, 24 bp, Artificial Sequence
  Synthetic Polynucleotide
tgcaccctcgtggatttattatgg

SEQ ID NO: 627 - DNA, 23 bp, Artificial Sequence
  Synthetic Polynucleotide
gaagcgcctggcagtgtaccagg

SEQ ID NO: 628 - DNA, 23 bp, Artificial Sequence
  Synthetic Polynucleotide
ccactacaactacatgtgtgaca

SEQ ID NO: 629 - DNA, 23 bp, Artificial Sequence
  Synthetic Polynucleotide
ccgcgccatggccatctgcaagc

SEQ ID NO: 630 - DNA, 23 bp, Artificial Sequence
  Synthetic Polynucleotide
ggaggacgtgcgcggccgcctgg

SEQ ID NO: 631 - DNA, 23 bp, Artificial Sequence
  Synthetic Polynucleotide
gaagcgcctggcagtgtaccagg

SEQ ID NO: 632 - DNA, 23 bp, Artificial Sequence
  Synthetic Polynucleotide
ctgtggcagtggcaccagaatgg

SEQ ID NO: 633 - DNA, 23 bp, Artificial Sequence
  Synthetic Polynucleotide
cctcccggccggcggtatccagg

SEQ ID NO: 634 - DNA, 23 bp, Artificial Sequence
  Synthetic Polynucleotide
gcttgcagatggccatggcgcgg

SEQ ID NO: 635 - DNA, 23 bp, Artificial Sequence
  Synthetic Polynucleotide
acacatgcagttgtagtggatgg

SEQ ID NO: 636 - DNA, 23 bp, Artificial Sequence
  Synthetic Polynucleotide
tgtcacacatgtagttgtagtgg

SEQ ID NO: 637 - DNA, 23 bp, Artificial Sequence
  Synthetic Polynucleotide
gagttagagcagaagaagaaagg

SEQ ID NO: 638 - DNA, 23 bp, Artificial Sequence
  Synthetic Polynucleotide
gagtctaagcagaagaagaagag

SEQ ID NO: 639 - DNA, 23 bp, Artificial Sequence
  Synthetic Polynucleotide
gaggccgagcagaagaaagacgg

SEQ ID NO: 640 - DNA, 23 bp, Artificial Sequence
  Synthetic Polynucleotide
gagtcctagcaggagaagaagag

SEQ ID NO: 641 - DNA, 23 bp, Artificial Sequence
  Synthetic Polynucleotide
gagtccgggaaggagaagaaagg

SEQ ID NO: 642 - DNA, 23 bp, Artificial Sequence
  Synthetic Polynucleotide
gagccggagcagaagaaggaggg

SEQ ID NO: 643 - DNA, 23 bp, Artificial Sequence
  Synthetic Polynucleotide
aagtccgaggagaggaagaaagg

SEQ ID NO: 644 - DNA, 23 bp, Artificial Sequence
  Synthetic Polynucleotide
gaatccaagcaggagaagaagga

SEQ ID NO: 645 - DNA, 23 bp, Artificial Sequence
  Synthetic Polynucleotide
acgtctgagcagaagaagaatgg

SEQ ID NO: 646 - DNA, 23 bp, Artificial Sequence
  Synthetic Polynucleotide
ggaaccccgtctgcagcaccagg

SEQ ID NO: 647 - DNA, 23 bp, Artificial Sequence
  Synthetic Polynucleotide
ggagtccctcctacagcaccagg

SEQ ID NO: 648 - DNA, 23 bp, Artificial Sequence
  Synthetic Polynucleotide
agaggcccctctgcagcaccagg

SEQ ID NO: 649 - DNA, 23 bp, Artificial Sequence
  Synthetic Polynucleotide
accatccctcctgcagcaccagg

SEQ ID NO: 650 - DNA, 23 bp, Artificial Sequence
  Synthetic Polynucleotide
ggattgccatccgcagcacctgg

SEQ ID NO: 651 - DNA, 23 bp, Artificial Sequence
  Synthetic Polynucleotide
tgaatcccatctccagcaccagg

SEQ ID NO: 652 - DNA, 23 bp, Artificial Sequence
  Synthetic Polynucleotide
ggagtccctcctacagcaccagg

SEQ ID NO: 653 - DNA, 23 bp, Artificial Sequence
  Synthetic Polynucleotide
ggagtccctcctgcagcacctga

SEQ ID NO: 654 - DNA, 23 bp, Artificial Sequence
  Synthetic Polynucleotide
gaacacaatgcatagattgccgg

SEQ ID NO: 655 - DNA, 23 bp, Artificial Sequence
  Synthetic Polynucleotide
aaacataaagcatagactgcaaa

SEQ ID NO: 656 - DNA, 23 bp, Artificial Sequence
  Synthetic Polynucleotide
cacccagactgagcacgtgctgg

SEQ ID NO: 657 - DNA, 23 bp, Artificial Sequence
  Synthetic Polynucleotide
gacacagactgggcacgtgaggg

SEQ ID NO: 658 - DNA, 23 bp, Artificial Sequence
  Synthetic Polynucleotide
agctcagactgagcaagtgaggg

SEQ ID NO: 659 - DNA, 23 bp, Artificial Sequence
  Synthetic Polynucleotide
agaccagactgagcaagagaggg

SEQ ID NO: 660 - DNA, 23 bp, Artificial Sequence
  Synthetic Polynucleotide
gagccagaatgagcacgtgaggg

SEQ ID NO: 661 - DNA, 23 bp, Artificial Sequence
  Synthetic Polynucleotide
tgcactgcggccggaggaggtgg

SEQ ID NO: 662 - DNA, 23 bp, Artificial Sequence
  Synthetic Polynucleotide
ggctctgcggctggagggggtgg

SEQ ID NO: 663 - DNA, 23 bp, Artificial Sequence
  Synthetic Polynucleotide
ggcacgacggctggaggtggggg

SEQ ID NO: 664 - DNA, 23 bp, Artificial Sequence
  Synthetic Polynucleotide
ggcatcacggctggaggtggagg

SEQ ID NO: 665 - DNA, 23 bp, Artificial Sequence
  Synthetic Polynucleotide
ggcgctgcggcgggaggtggagg

SEQ ID NO: 666 - DNA, 23 bp, Artificial Sequence
  Synthetic Polynucleotide
ggcactgagactgggggtggggg

SEQ ID NO: 667 - DNA, 23 bp, Artificial Sequence
  Synthetic Polynucleotide
agcagtgcggctagaggtggtgg

SEQ ID NO: 668 - DNA, 23 bp, Artificial Sequence
  Synthetic Polynucleotide
ggcactgctactgggggtggtgg

SEQ ID NO: 669 - DNA, 23 bp, Artificial Sequence
  Synthetic Polynucleotide
ggcactggggctgggggaggggg

SEQ ID NO: 670 - DNA, 23 bp, Artificial Sequence
  Synthetic Polypeptide
ggcactggggttggaggtggggg

SEQ ID NO: 671 - protein, 7 aa, Artificial Sequence
  Synthetic Polypeptide
KRLAVYQ

SEQ ID NO: 672 - protein, 7 aa, Artificial Sequence
  Synthetic Polypeptide
RAMAICK

SEQ ID NO: 673 - DNA, 23 bp, Artificial Sequence
  Synthetic Polynucleotide
tcagggtgagcatagactgccgg

SEQ ID NO: 674 - DNA, 23 bp, Artificial Sequence
  Synthetic Polynucleotide
gaatcgggaggggagactgcggg

SEQ ID NO: 675 - DNA, 23 bp, Artificial Sequence
  Synthetic Polynucleotide
tgaagtgttgcatagactgcagg

SEQ ID NO: 676 - DNA, 23 bp, Artificial Sequence
  Synthetic Polynucleotide
ggagagagagcatagactgctgg

SEQ ID NO: 677 - DNA, 23 bp, Artificial Sequence
  Synthetic Polynucleotide
ccaaacaaaacatagactgctgg

SEQ ID NO: 678 - DNA, 23 bp, Artificial Sequence
  Synthetic Polynucleotide
caggaagctggagcacgtgaggg

SEQ ID NO: 679 - DNA, 23 bp, Artificial Sequence
  Synthetic Polynucleotide
aaggctgagggagcacgtgaagg

SEQ ID NO: 680 - DNA, 23 bp, Artificial Sequence
  Synthetic Polynucleotide
gtcaggggaagagcacgtgacgg

SEQ ID NO: 681 - DNA, 23 bp, Artificial Sequence
  Synthetic Polynucleotide
gttgtgaactgagcacgtgaggg

SEQ ID NO: 682 - DNA, 23 bp, Artificial Sequence
  Synthetic Polynucleotide
atatttgctggagcacgtgaagg

SEQ ID NO: 683 - DNA, 23 bp, Artificial Sequence
  Synthetic Polynucleotide
gtggctggaggtggaggtggggg

SEQ ID NO: 684 - DNA, 23 bp, Artificial Sequence
  Synthetic Polynucleotide
gagggaagggctggaggtggagg

SEQ ID NO: 685 - DNA, 25 bp, Artificial Sequence
  Synthetic Polynucleotide
cacctgcgcaagctgcgtaagcggc

SEQ ID NO: 686 - DNA, 25 bp, Artificial Sequence
  Synthetic Polynucleotide
tcctccgcgatgccgatgacctgca

SEQ ID NO: 687 - DNA, 25 bp, Artificial Sequence
  Synthetic Polynucleotide
aggccggggcccgcgagggcgccga

SEQ ID NO: 688 - DNA, 25 bp, Artificial Sequence
  Synthetic Polynucleotide
gcgcggcctcagcgccatccgcgag

SEQ ID NO: 689 - DNA, 25 bp, Artificial Sequence
  Synthetic Polynucleotide
cctgtgcagctgtgggttgattcca

SEQ ID NO: 690 - DNA, 25 bp, Artificial Sequence
  Synthetic Polynucleotide
cacccccgcccggcacccgcgtccg

SEQ ID NO: 691 - DNA, 25 bp, Artificial Sequence
  Synthetic Polynucleotide
agtcacagcacatgacggaggttgt

SEQ ID NO: 692 - DNA, 25 bp, Artificial Sequence
  Synthetic Polynucleotide
gaggcgctgcccccaccatgagcgc

SEQ ID NO: 693 - DNA, 28 bp, Artificial Sequence
  Synthetic Polynucleotide
tgccatcacgtgctcaatcggggcccca

SEQ ID NO: 694 - DNA, 29 bp, Artificial Sequence
  Synthetic Polynucleotide
cgccccgcagtctatgctttgtgttccag

SEQ ID NO: 695 - DNA, 23 bp, Artificial Sequence
  Synthetic Polynucleotide
cccgcagtctatgctttgtgttc

SEQ ID NO: 696 - DNA, 20 bp, Artificial Sequence
  Synthetic Polynucleotide
ctcccatcacatcaaccggt

SEQ ID NO: 697 - DNA, 26 bp, Artificial Sequence
  Synthetic Polynucleotide
tttcctcccccccacaggtagaacat

SEQ ID NO: 698 - DNA, 27 bp, Artificial Sequence
  Synthetic Polynucleotide
tttccctctgtccacaccctcatcctg

SEQ ID NO: 699 - DNA, 27 bp, Artificial Sequence
  Synthetic Polynucleotide
tttccccagtcctccacaccctgaaac

SEQ ID NO: 700 - DNA, 20 bp, Artificial Sequence
  Synthetic Polynucleotide
tgcccctccctccctggccc

SEQ ID NO: 701 - DNA, 20 bp, Artificial Sequence
  Synthetic Polynucleotide
agagccccccctcaaagaga

SEQ ID NO: 702 - DNA, 23 bp, Artificial Sequence
  Synthetic Polynucleotide
ggcccagactgagcacgtgatgg

SEQ ID NO: 703 - DNA, 23 bp, Artificial Sequence
  Synthetic Polynucleotide
gagtccgagcagaagaagaaggg

SEQ ID NO: 704 - DNA, 23 bp, Artificial Sequence
  Synthetic Polynucleotide
gaacacaaagcatagactgcggg

SEQ ID NO: 705 - DNA, 21 bp, Artificial Sequence
  Synthetic Polynucleotide
gagtccgagcagaagaagaag

SEQ ID NO: 706 - DNA, 23 bp, Artificial Sequence
  Synthetic Polynucleotide
ggaatcccttctgcagcacctgg

SEQ ID NO: 707 - DNA, 20 bp, Artificial Sequence
  Synthetic Polynucleotide
ggcccagactgagcacgtga

SEQ ID NO: 708 - DNA, 23 bp, Artificial Sequence
  Synthetic Polynucleotide
ggcactgcggctggaggtggggg

SEQ ID NO: 709 - DNA, 20 bp, Artificial Sequence
  Synthetic Polynucleotide
gtcaggtcgagggttctgtc

SEQ ID NO: 710 - DNA, 20 bp, Artificial Sequence
  Synthetic Polynucleotide
gggccgcagtatcctcactc

SEQ ID NO: 711 - DNA, 20 bp, Artificial Sequence
  Synthetic Polynucleotide
ccgccagtcccagtacggga

SEQ ID NO: 712 - DNA, 20 bp, Artificial Sequence
  Synthetic Polynucleotide
caaccactgctcaaagatgc

SEQ ID NO: 713 - DNA, 20 bp, Artificial Sequence
  Synthetic Polynucleotide
cttccaggatgagaacacag

SEQ ID NO: 714 - protein, 7 aa, Artificial Sequence
  Synthetic Polypeptide
GSRYPGE

SEQ ID NO: 715 - DNA, 23 bp, Artificial Sequence
  Synthetic Polynucleotide
tgcccctccctccctggcccagg

SEQ ID NO: 716 - DNA, 23 bp, Artificial Sequence
  Synthetic Polynucleotide
ttttcctcccccccacaggtaga

SEQ ID NO: 717 - DNA, 23 bp, Artificial Sequence
  Synthetic Polynucleotide
gccccccctcaaagagagggtgg

SEQ ID NO: 718 - DNA, 23 bp, Artificial Sequence
  Synthetic Polynucleotide
agagccccccctcaaagagaggg

SEQ ID NO: 719 - DNA, 23 bp, Artificial Sequence
  Synthetic Polynucleotide
ggcccagactgagcacgtgatgg

SEQ ID NO: 720 - DNA, 23 bp, Artificial Sequence
  Synthetic Polynucleotide
gaacacaaagcatagactgcggg

SEQ ID NO: 721 - DNA, 23 bp, Artificial Sequence
  Synthetic Polynucleotide
gagtccgagcagaagaagaaggg

SEQ ID NO: 722 - DNA, 23 bp, Artificial Sequence
  Synthetic Polynucleotide
ggaatcccttctgcagcacctgg

SEQ ID NO: 723 - DNA, 27 bp, Artificial Sequence
  Synthetic Polynucleotide
  misc_feature (1)..(4): n is a, c, g, or t
  misc_feature (25)..(25): n is a, c, g, or t
nnnntctctctctctctctctctcngg

SEQ ID NO: 724 - DNA, 23 bp, Artificial Sequence
  Synthetic Polynucleotide
gcggatgttccaatcagtacgca

SEQ ID NO: 725 - DNA, 23 bp, Artificial Sequence
  Synthetic Polynucleotide
cgagcttctggcggtctcaagca

SEQ ID NO: 726 - DNA, 22 bp, Artificial Sequence
  Synthetic Polynucleotide
tgcttctccagccctggcctgg

SEQ ID NO: 727 - DNA, 23 bp, Artificial Sequence
  Synthetic Polynucleotide
agactgagcacgtgatggcagag

SEQ ID NO: 728 - DNA, 26 bp, Artificial Sequence
  Synthetic Polynucleotide
gatgttccaatcagtacgcagagagt

SEQ ID NO: 729 - DNA, 26 bp, Artificial Sequence
  Synthetic Polynucleotide
cttctccagccctggcctgggtcaat

SEQ ID NO: 730 - DNA, 24 bp, Artificial Sequence
  Synthetic Polynucleotide
gccgtctccaaggtgaaagcggaa

SEQ ID NO: 731 - DNA, 24 bp, Artificial Sequence
  Synthetic Polynucleotide
gtcgccgtctccaaggtgaaagcg

SEQ ID NO: 732 - DNA, 24 bp, Artificial Sequence
  Synthetic Polynucleotide
ggtgcattttcaggaggaagcgat

SEQ ID NO: 733 - DNA, 24 bp, Artificial Sequence
  Synthetic Polynucleotide
gccgtctccaaggtgaaagcggaa

SEQ ID NO: 734 - DNA, 26 bp, Artificial Sequence
  Synthetic Polynucleotide
gccgtctccaaggtgaaagcggaagt

SEQ ID NO: 735 - DNA, 23 bp, Artificial Sequence
  Synthetic Polynucleotide
ggcactgcggctggaggtggggg

SEQ ID NO: 736 - protein, 83 aa, Bacillus phage PBS2
TNLSDIIEKETGKQLVIQESILMLPEEVEEVIGNKPESDILVHTAYDESTDENVMLLTSDAPEYKPWALVIQDSNGENKIKML

SEQ ID NO: 737 - protein, 228 aa, Rattus norvegicus
SSETGPVAVDPTLRRRIEPHEFEVFFDPRELRKETCLLYEINWGGRHSIWRHTSQNTNKHVEVNFIEKFTTERYFCPNTRCSITWFLSWSPCGECSRAITEFLSRYPHVTLFIYIARLYHHADPRNRQGLRDLISSGVTIQIMTEQESGYCWRNFVNYSPSNEAHWPRYPHLWVRLYVLELYCIILGLPPCLNILRRKQPQLTFFTIALQSCHYQRLPPHILWATGLK

SEQ ID NO: 738 - DNA, 24 bp, Artificial Sequence
  Synthetic Polynucleotide
tttgtactttgtcctccggttctg

SEQ ID NO: 739 - DNA, 24 bp, Artificial Sequence
  Synthetic Polynucleotide
tttccagcccgctggccctgtaaa

SEQ ID NO: 740 - protein, 17 aa, Artificial Sequence
  Synthetic Polypeptide
KRTADGSEFEPKKKRKV

SEQ ID NO: 741 - DNA, 22 bp, Artificial Sequence
  Synthetic Polynucleotide
gtaatttctactaagtgtagat

SEQ ID NO: 742 - DNA, 23 bp, Artificial Sequence
  Synthetic Polynucleotide
tactttgtcctccggttctggaa

SEQ ID NO: 743 - DNA, 20 bp, Artificial Sequence
  Synthetic Polynucleotide
tactttgtcctccggttctg

SEQ ID NO: 744 - DNA, 19 bp, Artificial Sequence
  Synthetic Polynucleotide
tactttgtcctccggttct

SEQ ID NO: 745 - DNA, 18 bp, Artificial Sequence
  Synthetic Polynucleotide
tactttgtcctccggttc

SEQ ID NO: 746 - DNA, 17 bp, Artificial Sequence
  Synthetic Polynucleotide
tactttgtcctccggtt

SEQ ID NO: 747 - DNA, 23 bp, Artificial Sequence
  Synthetic Polynucleotide
cagcccgctggccctgtaaagga

SEQ ID NO: 748 - DNA, 20 bp, Artificial Sequence
  Synthetic Polynucleotide
cagcccgctggccctgtaaa

SEQ ID NO: 749 - DNA, 19 bp, Artificial Sequence
  Synthetic Polynucleotide
cagcccgctggccctgtaa

SEQ ID NO: 750 - DNA, 18 bp, Artificial Sequence
  Synthetic Polynucleotide
cagcccgctggccctgta

SEQ ID NO: 751 - DNA, 17 bp, Artificial Sequence
  Synthetic Polynucleotide
cagcccgctggccctgt
